United States Patent Application Publication US 2012/0108651 A1 - sequence listing, part 7

SEQ ID NO: 470 - DNA, 132431 bp, Homo sapiens
agcctgggtaccggggttcccccatagacatgaggggctccccctgcatcaagaacagtacatgcccattacccatatgagcgagccacgttgttacctacatttcacggtggagcaaatagagtcccacaggttagactcacctggccacacagcatttcatggtggaggaaaccgagtcccacagaggttagacttgacttgcctggccacacagcaagcctgagccacaagcaagctccccagcccttggctacaggtcgcctctgaccggcgagtctgaagtcagtcagttctcttccagctggatctggagggctgccgtcttctccagcagtgcccgcagggagggagctggcctgaagccctaaaccaccctcctcacccctctgcagggccaagacttatattctggacaaaagcaggatgtgtaccctcagccctagtcccataggaccttgggaagtccagtaagctctgggcctggcactgtgatgctactagcctatggaggcttccctgtgcccaggaggcagggggctctcagggaggagggcggcacagcccggggcaggactcacattcccaggggcccgccagcaggcggcgtctgagccagtagtactcagccagcacgttggccccagacagctctcggagcggccgcagcagcttctcctccatgaggtagctggtcacccgggccacgtccaggggctcgtcccccgcaggcaacagtggcagcatcaccaccactgagcggttcctgcagggaatgcagaggacaagtcactgtgcctgcccgagccttgcttcccttggctgcagaggggagcttctaggtctgcaggaagagctctgcagtggagagcatgagggtgcctttcagggaggggctgtccttgttttgggaaatcccatcatgaggtggaggaggacagaggccggcatgacaacggaggtggtagatgatggctggggacagaaacaagctgccccattttgaggacacagatgtccgatgtcatgcctactctgctccccgggtcttgggcagcatgggcttatgtgtggggatgccgaggacaggagctggaaggtctaggaaattttgttttttaagaatctcattctgtcgcccaggctggagtgtagtggcacaatctcaactcactgcaacctctgcctcccgggtttgtttctcctgcctcagcctcccaagtagctgggactaccagcgcccaccgcaacacccggctaatttttgtatttttagtagagttggagtttcaccacattggccaggctagtctcaaactcctgacttcaactgatctgcccacctcggcctcccaaagtgctgggattacaggtgtgagccactgtgcctggccaacaggtctagaaaatttctacagtttaggggaggactggaactttctcaggatctagagtaggagtcaagcctgtgagatttgaatgatcagggggatgtcagctcacatgggggtatagtgggaagacaaacatctcataccctgttgttgatgggccagtagagagggagcaggggcaggtggcctcacttgcttacttctaggaacccagaggccctgcagctggaggcaggaagcagcctcaactccctctctgccacctgaatccatgttttggcacccccacctagcagtgacaggatcccactcaccaggtaggtgagtaaccaggcaggtcattcttcagccaagccaaaccccgccctgggagctcttcccttcatcagcctccattctgaccgcaggaaggcaggagcaggaacttgtatcacagggagtcttttccccatgatgtgggtttagtccctattttatggctggggaaactgaggcacagagcactgaggcagaggaatcctagttagaggcagagccggattccagatgctctgtgaggccaccagcatggaagaaggagctgcctccctgcttggagcccggttcctggtgggcctcgtgcctgtgagggggaggatactgggtccccaggtctctgctctaaactgggctccccccttctatccaccacccccgtgttctcaacacaggggccaaaagggtcttttaaagtgaaagggcgatcacatccttcctaggtcagagcagaagccagagaccagctgagccccacctacccgcctccccagtcttaggaactcccagtcacatccactctcccttgcaggcattctgctccagccctgctggcttgatattcaaatagacagggctgggcttggtggctcatgcctataatcccagcactttgagaggccaagttgcttgagctcaggagtctgagaccagcctggctaatatggtgaaaccccgtctctactaaaaatacaaaaattcgctgggcttggtggcacatgcttgtaatcccagctacttgagaggctaaggcaggagaatcccttgaacttgggaggcagaggttgcagtgagctgagatcacagcattgtactccagcctgggcaacaaagaacaagactccatctcaaaaacaaacaggccaggcacatccctctcccaggcctttgtgcagtagtgacccccacctggagcgctcttaccacgctggccccgtggctcttgctgaaactctaccttctcctcaaagccagtcatggccacaccgtttcataggatccacccccccatctcaccgatgttccttctctagcatttgctacctaacgtatagctcaggggtggtaaatggtgaccagtgggccccagcctgtggccagcttctgcacggcctgcaagtaagaagggtttttgtgtgttaaaaagattattacaaaacaggccaggtgcagtggctcatgcctctaatcccaacactttgggaggccaaggcaggtggatcacctaaggtcaggagtttgagaccagcctggccaacatggcagaaccctgtctctactaaaaatacaaaaaattagctgggtgggatggcacgcgcacctgtagtcccagctactagggaggctgaggcaggagaatgacttgaactcaggaagtgaaggtttcagtgagccaagattgcaccactgtactctagcctgggcaacaagagcaaaactccatctcaaaaaaaaaaaaaaaaaaaaaaaagattacaaaacaaaagcaaggaaatgtgacagagccgaatggcctgcttaagatgcgactctcaggccctctgcagcgagctgtaccagccccggtgtagatgacttccttgtgcttcgtgtctgagtaaaagtgagcttcctgaaggcagggtcagcctcagccactgcgctctctgcagctcctgaaatcctgcctaccctcggccagtgctcacgaggtatctatggagtgaggaagaaagcccagcttcctcatctgtaaaacgaggagagaagaagcccctgggcagggtggtcacaggagtcagtgtgtcggaaggtgtcaaagcattcagcactgcacctggtatgtggcaggcacgcaggatgcgctactctcaaaccccgagttacctggccgacaggctgtacaggtccagcagtggtttgcagagcctcttcagtgcccgtgagaacgtggcctcagcccaagacagcatctgttgggcggcctggagagggaggggacagtgagagctggctcagtcatcctcacctgccaactacgccccatccttgctcactcaccagctccagggctcctttcatggcccccagggccgccctgatgggccttggaccccctttgcctggcatcccgggcacccaggcctgcagccgccgcatggcctcctctgctcgctcccgccacacctcctccaggggccgcagtgtcacctccaggtaggcatccttcagtgtggccaggggccctgcaacaggcagccaccacccaccatgagacctcagggcaggtcagagaaccagccctgcccagacacgccaggcctcgaggagatagggcctgttcctgggattaagatgtggggagctgggggaactggaacagagcagtggcactggagattgcaggggagttgtcacagcaggcctgagccgtctctgcaaggcctgcttataaggttgtctgggaacttggattgggggagggttcccaccagtcctagaattgatatgaggctccctgcatctgaactgtttgtacaaacgtggtttatgccggacccctgcttgcttcctaggagtctgacagtgtggtccgtgccaagcagcacctgccagtgtggcagcccccaataaaaaccctgggtgctgagtctcccaggagctgctctggtgacagctgggacagctaaatgcatcctgtgtgaaagcgctgggactgggagagtaccctgggcactggccctggttctccctagactccgccccagcccccttccctgtgctgacactcctgcatcccctcactataataaatcacagctgtgaatagcgctgggcggagtcctggcgcattcctcctgattcactgccctgggggtggtcacaggaacactctggcacagcagggaggatcgggaggtaacattcaacagccagtcagagggatgcccaccctggcgctgggcagggccttgggggctctgtgctgtgctgggcattagccctggatggcggagaggccagaggttcccagtcctgccacgaggctggttggggcagcaggtgtgagcctttaatgaccacctggccacattgagctcatcgtggaaccagaaagagatgctgtggcagtgagcttcacagaaacaaggctgtatactcaaaagaaagcaggcgggagactgaaaaaacctaggcagcaggcataagggagatgagcttggagactctgtaaaaatgacacagcagacccagaaaaaacaaaggctgtagatctataacaaataaggcagggggctaaacacagctgggctacaggcccatgggaagcgaggccacatttctgattgaaacagtgccacaggccaatgtgagcgcttagggccccggtggagaggggggacattgatttccgcacaggattgagccctccccctcccacacttacattccagctcctcccgcagctgctccagccccacctgcagccactccaggtaaagaggcaggtgctgggtcagtgcctggctccgggcccacaaagtggctactgcccaaccactcgcctgcatggcctcccgccccgcctgggacagctgcagaaggaggcctgccacgccgtccagggtgcctgccggctgcacctggacagggaaaccgaggcagaatcagggtgaggtccagggcagagagagccccagaccctcctgcctggtgagtgggggctacaagccaggtcagagggggacctctccaacctgagcccccaccctcccctgctgtgatacccaccaattgctggaaccttctcacagaggcacccaagccttgaaccttctcttccagccgggcttgcacctgggagccaactgctgcaatcctggactgtgaggacagaggaagaggctggggcctcgcaggaatgaagtagacacaaggttctcggtgccagcagcaggtgtgggcctcacaatggggttgtctgccctggtttctgggcacagctggaccccaagggctcggggctcctggcacgggggcctctgcccagtgggagaacggtaaccccttccctgtgtcccagcccaggccctctcacctccacatggcccagcaggcccccctggcagccgcgcgcggccagcaggagactctggttggcagcctgcagggtcaggcgtcccagcggctgggagggctgcctgccatcccggaacaggacctccgcctcggctgtccgcccatgggcacatgcccgcagcaccacactctcctctctgccccctggagccagaaagggacctgctggtgcccccaccatgtctctggctgcccactccccctccaccgctttccgtagctccccactgccccaggccaagcctcaaggccctaggatttgagaaccttgagctgcaccacctagagcaaccacctgagccacctgaagccccctcttctgtcccctcccccgacacggcagtcagttagggatgccataaggcttcagggggtttcctgaggtttttttttgagacaccaaggcaggagtacagtggctggatcacagctcactcccagcagctgagaccacaggaacacatcaccccctaccccaccaggttttttcgtttttgtttttgttttactttttgagacagagtctcgctctgtcgcctaggctggtgtgtggtgacacgatctcggctcactgcaagctccgcttcccgggttcacgccattctcctgcctcagcctcctgagtagctgggaactacaggcacccgctactgtgcccggctacttttttctatttttagtagagatggggtttcaccgtgttagccaggatggtctcgatctcctgaccttgtgatccacccacctcggcctcccaaagtgctgggattacaggtgtgagccaccacgcctggccaccccccccccttttttttaagtagagacggggtctcactatgttgcccaggctggtcctgaactcctgagctcaagcaattcacccatctcggcctcccaaagtgctaggattacaggtatgagcccctgcacccagccccgacttctgaaatcttaacgcccagacccccgtcctttcttgagccaacaggggccgtggcccagctagctgagctgggacccagctgccactcaccctcctcatgggccacagaggcctgcagacagcttggggcccggaacacagacagcctcactttctcctctctgttgtccacgcttccctccaaccggaccaggctttgagaagtcgaggtggagacacggcccagtaggccaacccgctgagccttggagccacgaagctgggagggggaaggcagaggcctgagtggagcctggcccacctgtccctggtctctcccctgcccgccccaggctcaggaagaggctggctggggaggctgctgttggacctgtagggaaccaagggaaggcacaatgcccacgcccgatctccagggcaccaggttccccacgccatatccctgtctaaggctgccagtgccccattacagaaagcacttttgaaaatactccgggccaggatcaagggctcactcctataatcccagcacttcaggaggccaagacgggtggatcgcttgagcccaggagtttcagactagcctggaccacatggcaaaaaccctgtctctaccaaaaatacaaaacttagccagtctcatgacaaatactttttttaatttttaaaaatacccatctaggagcccaacccagcagcagccgcccacagggtggcttagagatggctgctgcccaggccccacccagacactctgatttaattggtgttgggggccccgggccctggcatttctaacatccccagtgccctggtgtttctgctacagcccaggctttccgagtttgcatgggaaccactgcaaaggtctaagcaaggagacacgggcacacctggcataacaccccaggcactgggcagcttacctaagtccctgcaggtgcccagccttgggggcacggcagggaccaggacaggcgagtctagaatggggtgggaaagaggctcagaggcccccaagagaacacaagcccggaggaggccctgcaggggagggagcctcagctaccctgtattctagtccagacactgcagctaacaagctgtgcacccttcagtaagggtgtcaccctctctgggcctcagctccaagatctgtaaaatgatacagaacaatggttcacaaaacttaacaggacttaagagtgtgtgtgcgcgtgcacgtatgtctgttaagggttgaattttgttcctcagataggttgaagccctaaccttctatacctgtgaacgtggtgttattcggaaataggttttttgcaaaagtaatcaagttgaggccatagtggatgaaggtaggccacacacccaatgaatgctgtccctgtgagaagaccatgtgaagatgccacccagaaggcagaaggccaccacgtgggacagaggcagagactggtgtgatgccaccacagccgtgggtcctggcaaccaccagaagctggaggtgctacagaaggatcttccctaggactttgagagggagtgtggccctgctgacaacttgcttttggacttctggcctctagaactgtgacaccatacctgtctgttgcattaagccttccagttggtggcaatttaatacagtagtcctaggaatcgaatgcagggtgcttactaaacatgcagaagcatgtcgatctctgaggagatccaagttggtaatagggctacagcccaggactcctgtggaatttaaccaagcacaatgtgatcttgccaggcaggtgggggcaggggacggtctgcagaccacacggagttggccctggatggctcccagcatctgagctcagccccgctgggtgtcactgaagagcaagggccatgcctgcctctgtgtagcctgggtgaatgcctgacctccctgaatctgtccctcatctgtcctggggccactgggttggggtgagcaagaaacaaggctgggaaagccttctgaccactccacagaccccagaatggaccaagtgagaatagctgtcccaaataaatcggggatagggaagcaagaggaccagcctcttgccgagcatccgccatgggttcactcccagggctccagttccatcaggcacggggcttacagagccgggggcaggcaggggcctggctggaaacggggaagtgacagtcagtcccggagaacaagaaccttggaaggagaaactcctttgaaatggccacggctgctgaactctcaacccagaaatgccatcctcattcagctcggatgccgggaagggagggaactcccctctcacaagcacctgctacatgcagatgttgtacaaatgtgtttgctcctaaccattctgcaagggagatggtatttgttcccatttgacagaggggaagactgaggctcagcaaacgaaagtcacgaggccaagttcacctggccagggagacagaggaggtggatggaaacgccgagagagcacctgctacgtcacgtgccttggctacgcaggcagcgggaaccggtatccagactcccaaaaaccaccctgtgaaatatctgatcccctcctacagatgaggaaacacatgctcagagaggttccttcctgggatcacctggccaggtcagggcagagtaggtattggaggccaactctgccccttcctacttcccagggctgctgggagtaaggagggggaggagatggtaccagtaatggctaatagcaaatacttacgtagtggctgttttctctcaggcactgctctaagcgatctatgcctacgactatatttaacccttgcaatattaaccccatgggagatagggccagtacaattatacccattttacaggggaggaaactcaggtaccaggaggcagctaggctgggattcaaacttgggcagcccagccactgcctctctgttataggaagggccgggtgttgggactgtggaggagctgccttgtcttggcgccagggccaggcctggggttcagcaggcgttcccccgacccagaatgaagctctggccccatccagaatgctggtttgcagttcctcagatagccactagatggcggggccgcccaggcagttgggggcctgctggccagggaggaaccgcagggatgccgggatatctttcccagggactgtcagccccatcctggccactgacctccagtgccccggagaagtcagctgaacgaggcctgctgtggttttggagggtcaggctgagatgcaggccgtggtctgggtctggtgcaaggcccaggtggcagcgggaacgcagcaggagtccaccctggcccagggtgtgctccccgacgaccaagagggcctgggacgagagagtctaggtgtcaggcaggcacaggggtggcagcttcctctctccccagtcccctgcaccgagaatgcagcagcagctgccacctcccagcctccacacctgtcgcagctcacagctgacctctaagaaacgcaaatcagatgccgtcccctaagaagctgggctctggcatggcccgtggcctgctttgttgtcccaacctcacttcccttgctccctccgtaagtgctgccccgtgttcctcaaggcagagttgtgccttaggccccttccctctgcagggctcacactcaccagtgaggcccctttttgcaacaccctggcccctctctgcttcattcctgcacaacgtttactacaccctgaccatagaccatgcatctctagtttgttgtatcgtcctggccccactggaatgcgccacccaggaggccggcacctaggctgtgtctttcacatccactccctgcacctagaacacagcctggcataggtgaaacacacaaatgttttctgaatgaacagaggaaaagataaggggtgggaaactatggtttggggccgaatctggctcactgcccactcttgtaaatgctttttattttgagacagagttatgctctgtcgccaggctggagtacaatggcacgatctcagctcactgcaacctccgcctcccaggttcaagcgattctcctacctcagcctcctgagtagctaggactacaggcacgtgccaccgtgcccagctcattttttctatttttagtagagaagaggtttcaccatgttagccaggatggtctcgatctcctgacctcgtgatctgcctgcatcggcctcccaaagtggtgggattacaggcgtgagccaccgcacccggcttgtaaatacttttactggaatacagccgtaaggattcatttacatattgtctatagctgctttcacaagacagtggtaaagttggttgttggaacagagactggatggttcataaagcctaaaatatatgctatctgtctctttacagaagagtatgagtccttgggatggagggagggagggatggagggagggagggatggagggagggagggagggagggagggatggacggacggatgaatggatgcaagggaggaacggttggaggatgaatggatggagagagagggtacatgggagggcagatatacggggatggatggaagataggaaggaggatggaaggatgcgtaaaggaatggatggatgggttggtggatggaagaaccaatcaaccagctaccaaccccaggaggggaaaggggttgaggaaaaggagtcctaacacctctcctctggggtaatgatgactacagcagctctaactcatgtgcccggcaccaaggctgagcattcccgcatcatgtctctcttaagtctcaccatcactctacgtcctggaacctgctgctccttcctcagatgaaacaccagaggctcagagaggagatgtgcactgcccagtcacccagcaggcaaatggcagagccacgatggtggcgtctggctgcctcgctcacacccctgcattctgcgggcaccaccctcactgctgccccctcaccatgggtccctggtcctccagctgcccccttctgcagggcagactcaccctgggcaggtcacagagccccaggtggagggagtgccgcagccagcgtgcatagtcagtctgtacttctccccagaagctctgacgggtacaagaggccccgaggacgtgctccagcgtggcctccatgatgatcttgtctggctgagatggccaatgcctctggaatgagagggcctatgggtcaggggctcatcacctaagagaatgcccatggccagctgcagttggagaccctcacctaggcaagagcatgtgccaggaatgtgccgtcagagctctcatcagccacagcacccccttacactctgcggcaggatttttttttttttgagacactcttgctctatagcccaggctggagtacagtggcatgatctagactcactgcaacctctacctcccaggttcaagcgattctcccacctcagcctcccaaatagctaggattacaggtgcatgccaccacgcccagttttttttttaattctttagtagagatggggtttcgccatgttggccaggcgatcaggtgatccccccacctcagccttccaaagtgctgggattacaggtgtgattcgccatgccccgctcgtggcaggatttctgctgtgagcacttagggggccatgcctaagagccccaggaacccaggcgggaggtccagaggaggaaggggcttccagggccagctctccccatttctccatggcctggttcctgccccaagctctgcagaacagtgctcggccccatgaggagccctatcaggtaatgatgctggaggagaccagacctgatgcctcggggaaccggagctcccgatctccctccgccccctcccgagaagccccctagcatcccaccttcttccccatctgttcccagcatctcgggccgttccccttgcttttcttgtcttccagagccctcaccacatcccagttaggaagggaaccatttcacagatgagaacactaaggctcacagcagagaagtaagttgcccaggatcccgcaagcactggaacccaggaccacgtggccccagagctggacgctcctgtggcaggtggagccgcctgggggttccctgcccagacgctgctcccctgacctcacctcgtaggtcaagttctgcgcatgcggtgctggccccaggacacgttgagctgttcaacgaacacagctggggtctgcgtgaaggccccgcaggcctggaggctgttcaggccccaggtttcctggagctgatagggaagagaatagggtacatgacctggggggccagctgagaagcctggagcgagggggaccccctcactcggtgcagcggtcaggccccacatacctgccccggggaggcggccaggcagccgtcccaggcggtgctgtgtgctaaggacccgtcagcccaggtgagctgcagcgtcgcaggttgtcctctgttccaggtgagctgcacctgcattgggatgggagggcagtggtggggaaagggggacatgtaggggagaggagaggttaacggtgtccccacagccatctctgttgggaaatgagaggctagggaggatggagaagctggtgcccctcccccagatatccctagaggaactaggatggagggtggagagactgccctgcctacccccatctctggaagagctcagagccattcccaggctggagactgaaagcatttaaatgaaaaaaaaaaaaagcctcatccccaacacccagactcagcatttccaaagacagaaagcaaccgtgctcctcactggggcctccagggccagcatgatctgtccctgcccatctgacctcatctccctgtcacccatccctcccagtcactctgttcccatcttatttcccttccagccctccccaaagcacccggctcattcccaccacagggcctttgcacgggcttttcctgttgcctgcagtgctgctcctccagcttctctcaagcccggctccttcccatcccggggccgcctcccccatgaggctctcactgaccacccaccttacagttgctgccccacccacccacccagtcacgctcagtctcacatcttttttttttctttttttcttctgagactgtctcactctgttaccaggctggagtgcagtggcgtgatcttggctcactgcaacctccacctccagggctcaaacgatcctcccgcctcagcctcccaagcagttgggattgcaggcacacaccaccacacccagctaatttttatatttttagtagagacaggatttcgccatgttggccaggctggtctcaaattcttggcctcaagtgatccactggcctcggcctccctcagtgctgggattacaggcatgagccaccacgtccggcccctctttactactttacagtgcttatcatatcacaccttctgattttttaattcattccttggcttgaattctggagagcgtcttttgcctgcacacagctggcctgttgtcctccctttcatagatgggaaaacctgagtctcagagaggcgataggacacacccgaggccccccagccagacagggagcccagctgcctcactcagtccccaaagctaccactaaacaagcaactataaatgatcaatcagagacgcctgtacctgtttcccacattaaaatgtgagctatcttcaaacaccgcctggtatacagtaggtgctcaatgaggtattgataaaggaatgattgaatgaaggatcccagagatccccaggcttcaggaagctgtgattccggagaagtctttgtcactgatgaacacactctccttctcctaccagaggtgcccagccccacaggctcagtcacgcggctcccacctccagccccggccaagggcgcctgggacatcctcactcacctgccggctctgcctgccacccctgctctcagcaaggccactggcctcggcttgccgccaagggaggttgaatgggtgagccagggccaggcgggcggccagctcactcttccccagccacagggaggaggagaccagcacctagggagggagacagactcagccagtggccttgcccagacagactgcacctctttcccacccgcacagaccaccttctccatcgaggtcaaggctgcaaaagggcaggtggctttcagcacaaaaccccatccctgtgcaaggccctcggagagctcagtccatttcacagaggaggaaatccaggcttagagaggagcagatggagcgaacacaggacagagatgggactggaggtcgcgctcctcctccactgtcttcccttagctctgtggccccgggcaggtcactgcacctctaagtgcttcaatttcgtcatctgaacacgggcccattaatagcgccgagcagatgggaggctgatgtgtggcttcacgcacagaacctatcacggggtaagcattcagggcctgtgagccaccgtcactgccgtggctgtcaaggtgttgtggggacccaggtctcctgctgcccccccagtgcctttcccacagtcccttggggatgtggtacagcctcattgaccccagataaggctcctcaggcaggggagggccccaaagaccccgctcagcctgcagggtggagttcagctctgccccagggtcaccttccggccctgacacttacctggtccctgccatcccagccgacaaccaggccatcccggtggctgcctcccaaatgctctgaggacaggcggaggctgcagtgtcgcggcagggggaggggcagcgggtgggtgagctccactgggtgggtgaggacacacacaaagggtagggcacgtgagctgaggtcagcagctccaggcccaagggggttcaggggactcaactgacgccactgccagctcacgcaaatggccactcgggggccacacagccagataattttcacaaaactcagaagctacacactcgctttgtcaccattaccactcgacaccctgcactgtccctgtgggagccccgttacaatgagactctgaggctcctccaagaggtggcgtctgcctccccagcccttgaagctgggctggcctcgtgacgtgctaataaaattcagcaaagttgaccgagtgccagttctaagcccaggccttaggaggcctcaccccgcttcctcccttgaacccctgtccagccacatgagaacaaaccctgctggcctgtgggctggtgccacgtggggttggggagagcctgctttcagctcaggatgtcctagcgcagctgacagctagccagcccctgagcaggctggagagcccagccaaggccagcggagccgcccgctcaccctacagctgaccttgaacatgaggaagaccagaaaagctgcccaggtgacccacagcctcgtgagcaaggcgccacgcttgctttatgccgctgagtttcggaatactttgttaccatcctgaatcaggagctgatgggggcagccgcaacctcaacaacctgcatccctctcgggggcctcacatgcacaggtgccctgtgccccctcggaagccccacaccccatgccaccgtctgctgtcctgtgctctccttccatcttggatgtgacaggtgacaccccatagctgagtcctcgcaacaacagatggcctccacaccccgggttttcttcctctgtcccccaggtgagtcaagctgacctgacctccgacatcacttgaccccatctcctgaggcccctgagcagccctgctttcccagaccccacagcaggaggctgcccgaggcccctgtgcacgctggtgacctgtgagctctgtacaaagggcacccacctgttcagatgggctgcaggagccgtgcccagagacactggcactggctggttctcagggcatcacccagtcattggttctggggaggctgaccacatgcagggctagaaccctttgttcctgccacccgctgaccccacctgcaacactgtcaacaccgtgtggggctgcagactgtgtagctcaccaagggtggcacaaatacacacacacacaggcatgcacacacgtgcatgtatacacacacatgcacacatacacacatgagcacacatacactcatgagcacacacatacacgcatgcacactgccttggcttgctggggacctgctcacttcctctgccttccagggcacacatgtggcaaatgtgacgctgggaggattccatcaggccacctggtaagccgtgcctccaggctggggtctgcactctgtctccacacctggcaggctgtgggtcgggctctgctctgtgctcaggaggttccttacacagaaactaagtcttgtggctgcccaggccacaaattacagccccttccagggatgcctgtttctggaggacccaggggctcatggctgctgttgttggcgctgtgtcggcactcagctcccctggcaccacaactgcccagggatgccacctcttccacgccctggccccttctccctgcccggctgcactcaggataagccccagctcctctctatgagctgagacgctgcatgacctgggtcccccagccctcctgcctcgcctcatcccttctccccattccagccatgctagccccgcagctgctgctccacatgcaaacctcatttccaagtggggccttccgcctgaagtgcctctgctcagatctgccagctccttctcatccttcagaactcagttcagaagtcacctcctccaagaggccttcccagaccaccccacctaaaggaggcccacaccccacaaagaccctgcttgctctcacagcctttcccactcgtggaaatggtcatgcttgacgttattttgcttatgtgcatcttgttgctcaatgcctgtctccctgaggggtgacacctgggccatcttgcttcctgatggacccctggtgcctagattacacctgggatatgcaggtgctcagtcatggcttttttgagaccgagtctcactctcgctcaggctggaatgcactggctcaatctcggctctctgcaacctctgcctcccaggttcaagcgattctcctgcctcagcctcccaagtagctgagattgtaggtgcctgccaccatgcctggctaatttttgtatttttagtagagatggggtttcaccatgttggccaggctggtctcaaactcctgacctcgagtgatctacccacctcggcctcccaaagggcttggattacaggcatgagccaccgcgcctggccagggatgatttcttgagtgactgggccacccctgcctgcagcccctcacacactcaccctgcaggctgaggttcctggtgggcttggggaaaggcccagaaaggctcccggtgagggccacctcctggccatcccacagcaccacctggcgcaggacacgggtcccatgagctcgctcgtatgcggtctgcaggaacagctccctgggaagagcgctgagctggaagagaatgacggcgtcatgggggaacccgacccatgcttctgcctgggatgggaaagaagagaagcttgcagaggaggaaaaagggaatatttgtggatcatttacagtttcctgaatggtgacatatgtcaggggatcaaaaacccaaatgcttcctaaggatgagcagataatttaaaggagaggagtaggtgaggggagtatggccaacaggagacagcacagaacagccacttctcaattccatggccaagctgtgtggctctgggcatttttcaacctctctgagcctcagtttcctagaaaatggaggccagaaagtgtcaacctttgcaagatgatacaagtggtgcactcagcccagggctacacggtggagaggagcttgtaggaggcacgcagttggtattgcggtttctcaatcatgtagcgagcaggtatcatgctcccaagccagtgctgagtgcctgggtacaaagctagccaagacctggtcctggcccttaaggggctcccagggagatagtcgagatagtcacaggacagaaaatgatgggataaggtgacaaggatggtcacaagagacattcaagggagaaaggaacgcagagaagcaagcttggggaggaggcagggaagagcattctaggcagatggaagagcctgtgcaaaggttcggagagggacgccgtccctgctggtgggtgccacagtccgagggtgacttgagggcactgcagggggactgctggggtggggaaggaagtttgctcttaaacgtctctaaaacctatcactactgcccccagcttggtccacgcattattattgccctgcccctgcccattatggggcttcctcactgctcacttctgccacctgtaggtccctccccacacagcagccagagggatctgaaatcatcatttatttgatcatggcttcaaaggcttctagtagcagatagaacacaatgcaaacgcctccctgtggcctgactgaccctgtgtgatcagaccacctcctaccattccccacccacccagctccagcccagtggctccttggccattcctaaaacatgcaaacccatccctgccccaggccctttgcatgtcttgttccctctgcctggaatactctttttaaaaaatgtattttagattgagggggtcagtgtgcatgtttgttacataggtatattgtgtaatggtggggactgggcttccagcgtccctgtcacccaaatatcgaacatcataccaggcaggtaattttccaacccttggctccctctcaccctcctcccttttggagccctcagtgtttactgtttccatctttatgtccatgtgtattcaatgtttagctcctgcttacaagtgagaacatgtgatactgggttttctgtttctgagctagttcacttaggataattgcatccctgctgctgcaaaggacagaatttcattcttttttccggctgtgtaatattccatggtgtatatataccacagtctctttacctgcctcgaatgcccctcccccagagatttcttttttcttttcttccttttgagatggagtttcactcttgtcacccaggccgcagtgcaacggcgcaatctcggctcactgcaacctccacatcctgggttcaagcaattctcctgcctcagcctccaaagtagctgggattataggcatgtgccaccacgcctggctaattccatatttttagtagagacggggtttccccatgttggccgtgctggtctcgaactcctcacctcaggtcatccacccgcctcggcctcccaaagtgctgggattacaggcgcgagccaccgtgcccggccttcccccggattttcaaatggctggtgcttatcatccaccgctagctcatgtgtcgtctcttcagtggggcctttcctggccacctaatctaaataagctccttggtcactctcagtcacttcagtacgttttctccgtatcatagtactatctggcatatttcgtttgtgtgatttcggggagtcaatctcccccgctagagtggacacttgatgagaggaaggattgatcagatctgttttaggtcacgccccagcttctgaaatagtgcctggcacctagtagatgctccataaatcatgcaataaatccagctcaataaatccagcacattgtgtccatttcacagccttgtctgtccttccgcccaggaaccgggacactaggacaatttttcttttctcaaagggctgtcccagaggccccccaccccagcgtgctccggccctgggctgacctccacacacctgcagaaaggtctgttccagtttgatgaaattgttgagaccggccttagcagctacctgccgggtgctgatgtgaaaatgacgctcctccacgcccaaggcgaacatgctctgaacctcacccttggagtagtgtagctgggtcagaaaaaaaaaaaaccaccacaaaacacgataaagctcctcatcagggctctgatggaacattccaggagatgctggctgtaggccgagggctctgcctcccaaagtcccaggcccaagagacccacaactccctgggctggatgaagtttgatgatgcgagggtttggagcctcaggttaggccatcaagcgtggccatggcaactatctccttcatgccctccctgctataacattgacttgaaaatatctaccagcctggcaccagcagccaagaattctagttgtagtactgttgcagacagcagggggcagtctagcagaaagaattatgcctgggtgcgtgtcagcatcaaacacaacagaactccaagtgtggatctaccactgagaggtgagtgatctccagctagttccttaaccacccaagccttctaatccaaaaacagggataaggacacctattttattacgggttgctgcgaaaattgtatgaaataatgtgctaacttccaggttggctgaaaagcagaatcactgcgggggaacttattaaaaatacagattctgggctcccacttaaaacctacaaaaatggagtctctgggaagatgttccagagctgtttttttttttttttttttttttttttgagaaggagtcttgctctgttgcccaggctgctgaagtgcagtggcacgatctcggctcactgcaacctctgcctcctgggttcaagtgattcttctgcctcagcctcctgagtaaccaagattacaggcatgtaccaccacacccaactaatttttgtatttttagtagagatggggtttcgccatgttggccaggccagtctcgaactcctgacctcaggtgacctgcccacctcggcctcccaaagtgctggattacgggtgtgagctaccgcacccagccaagagctggtatttttaacgcgctcactagaggcgtcatttcgttagtgataccccttgtcaaaaatgttcagcctgaatcttatcttcaagaaacaatcggacaaatccacattaggaggatgttttgcaaaataacttcctggacacttcaaaattgtcagtgcaggatttttttttttttttttttttagacagagacagggtctgtctgctctgtcatccaggctagagtgtgcagtggtgtgaacacagcttactgcagcctcaacctcctgggctcaagcaattcttccatacctcagcctccctggtagctgagatacaggtacacaccaccatgcctggctgatttttaaattttctgtagcaatggggtctccctaggttgcaggctgttttgaactcctgaactctaacaattctccttccttggcctcccaaagtgttgtgattatgagtgtgaaccactgcatccagttgggacttttctgaaggtggttaatgacaataaaatgtttagggggaattatatctgcaacttactttgaaatgtatccaaaaataagatggatggatagagagctatgtgattatgtgaaataaaatgtaaacaggaaaatctagtatgtgggtatgcactgtaaaattacttcaattttttagtgtctaaaaaattgtataataaaatgttggggggccagatgcagtgactcatgcctgtaatcccagcactttgggaggctgaggtgggcagatcatttgaggtcaggagttcaagaccagcccggccaacgtggcgaaaccccatctctaccaaaaatacaaaaattagccaggcatggtagtgcatgcctgtaatcccagctactcaggaggctgaggcaggagaattgcataagcccaggtggcggaggttgcggtgagtcgagatcacgcctctgcactccagcgtgggtgacagagtgaaacttcatctcaaaaaaagaaaaaataaataaaaaaataaaaaaataaaacattgggtaaggaagggtagggtgtagaaggaaaatattctagatcaggagttggcttttgggtcaaatttggcccacaacctgattttataaaaagttttattgtaacagccatgtctattcacttacatatcgtctatagctgcttttgtgttacagtgacaattctgagtagttgtaacagggaccataaggcctgcaacccccacaacattttactttacaataaaagtttgtagacctctgttctagattaagaaaattaaaaagacatggcaactacgaatgctgcgtgatcttggcctgcatcccggatttaaaacaaaacaaaacagttttttgaaagaacattagtgggaaagctgggaaattgtatatgggctgtacattaaatgaaggtattaattcaacgttcagtttctggaatgttgtaattaccgtgttaaatcagaaaatatccttgttacaggaaatagttgaagtatttcagagtaaaaagttgatgtcttcagaaacgtctctatattaattcttaatgatacagaaaaaatgtgtgatgatacaaatttatgtaacagataagaaagatggaaagatattaacaattggtcaatgttcactgtcctacagtagcttttatataggttgaaataactcaaaataaaacttgggaaaaaactaagaagctcccggaatggagccaggtgtggtggtaccacctgtagtcccagctactccagaggctgaggcaggaggatcacttgcacccaggagtttgaggctgcagtgagctatgatcacgtcaccacactccaacctgggtgacagagcaagaccctgtctcaaaaagacattctaaaaacaaaaaataaggctgggcgcagtggctcacgcctgtaatcccaacactttgggaggccgaggtgggtggatcatttaaggtcaggagtttgcgaccagcctggatatcacggtgaaaccctgtctctaccaaaaatacaaaaattagccaggcgtggtggcgcacgcctgtcattccagctactcaggaggctggggcaggagaatcgcttgaaccggggaggcggaggttgcagtgagccgaaattgtgccactgcactccagcctgggtgacaaagagagactgtgtctcaaaaaaaatttaaaaattaaataaataaataaagaagttccctgaatgactgtgcagttggagcgaagtttgaggaactccaaaatcacgtgtaaatgcggcaggggacccagcacatagcgcatgctctgtagacaaaggtggcctgggccagggctgggagggtgcctaccaaaacatggtggctggtaggaaaatgaagtgactagttacagatgtaaccattcatgcatgcactcacctattcatgccctattttttttactaaacaactactgtgtgctgggccctgtgccaggcactaggcatgccctccaggagctccggatctgggcacagacaatgacagctcagagggacagaggaacctggcctaagactactgggccctcctgtgcactcctacgacccctcaagtcctgcatgcagggcagagatgggggtgacgctggctcagctccaaagggctgtgtcatctgctccagcttctacaagtgtgccaggctgggtgaggcaatgccaggcgccaggcactgggtgaggaggcctcccccatctcccaaagggcttgtgagcctgactgggggccacgggggctggcccaggaatgtaaacctgggtatgtttgggaaagctggagccaggggtttccgagggttgcccaccggagcctgctgcaggctggtgaacagatgtgcatgtattaacactccccagaggggcctggccccctcctgcctcgggctgggcatctggaaccagttaggagccaggcagctggggcacagttaccttagctgaggctgaggctgagctggggcagagacccaggaggaaggggaggcgatgccggcctgagaacagcagctctttgctagaaggaaggaaagagaaggcctgaagctggcaagacagcaccttgtccagtgcccccagggccatgtcgagaccaaggggacttccccgagagagagtcagagagccaggatcacatcagtggcccagttcagggctattcacacaccccgaggcccaagggccatacggtgccctggttagggctggactctggagccaagttacctagatttgagtcctggcttggcctctgcctagctctggcaccaggagcaagcttcttggttgtccctctctgagcctcagcttcccctgagcctcagtttccccattggtatcaagggttaaacatggctctgggcttcaagtcttccatgagtccatcaatgagctttcttgggttggtcccatgggagtcccagcagggtctggacagcaggattttaaccccctgactccctcccagggatcctcctcacatagcacccctcccctcactcctccaggccagggtggttacaatctccacgtttttctctttttctttttttttttttccttcttcactagagacagggtctttctctgtcacccaggctggagtgcagtggtgccatctctgctcactgcagcttcgatctcccagactcaagtgatcctcctgcctcaccctcctgagcagctgggactacaagcatgcgtcaccataccaggctcatttttaagattttttgtagcgatggggatctcactatgttgcccaggttggcctcgagcttctgggcttaagcaatcctcccacctcgacctcccaaagcactgggattacaggtgtgagccgctgtgccaggcctctctcccctgttgctaactccagggtgctacaccctcttgtcaggttcctctccacctccatgtctcagccttggcacagctgacatcttgactcctggccttcacagtcgtgggtgtgtcctaggcactgtaagatgcttagcagcatccgtggcctctatacactgactctcacagtgtcctcctccccactgtagcaaccagaaattccccagactttgctgaaagtccctggggggaaactcgcccctaggtgagaaccactggtctaccccttcaacaagtggcttactcaccccctccctcactgctgagacctgagggctagagcctggctggtggcccctgacttactgcacacgtaagagcaccaagcgcctcaccaggcccccaggcctaagggcagtaatagttattaataagtgtttggggccttggatgcacttagtttctgagactgagaactcatcagtgccctgcctggagaggatgagggatttttatagctgtgtgaccttggaaaagttacttggcctctctgagcctccctgcccttgtttatgcagcagtgctgagcagagaattgagaggtgctgtgtccagcgatggtgcacagcaggtacccagtcaatggttcctcccccgactcctctcctcctgggggcccccctcacctgactgcctggttctggccacggacgtcaaggaccaaggtggcctgagaatcgcaggtcagctgcagtgaggagctcatctcttctgcctcccagagtccttggaacacgagctgaggagggagcaggctgtgagatgtgtgggtgtacatagcctgaggagcctcacaggctgggtggggaccccagccgagctctatagcccagcacgtccctgtccctaagcccagcatggcctggctcatccaacactctcacaggtgctgaggatacagggccggagtcagcccctattgcagctcaggttggcagtgcccaccgagggacctcaaaggacagctgcagcccagacgtcgacagagaatgtgctcccgggagggctccctgtcacctgacctcgaggccaggaaagggtttagatgaagccaagggcacagggtatccagtccactcagttgtggggtacagggctgagatcctttgcaggaggggtgacatcctggccccctgaccccctgggagctgctccctcctcctacagcagagtggactggggcaggggttgctgggtaatctgaaacaggagggtgtgaaagaagcattggcgcctggctctagaataggctctgtggctcttggagaaggagggcccagccaagcaggacgagttcatgccaagtgacagtggtcagggcatggccccatgtgggttcctcttcaccgaggcaggaggacaccgtgaggaagggcctgggtgccaagtctgagtccctattttgctgctaacttgctaggtgaccttgggcaagtcacccacactctcacgtgtgacccagagatgatgatgatgacgataataatcactgtcagaccatcagcatcttcttcttcatctttgccttcatcacagcaggtgcttaaggatctactcaggcattaatgggatgaactcactcgatcctcacaacctccacattataggtaatatcatcatccctgttttgcagatgaggagatgagggcacagacaggtgaaggaatttgcccaaggccacacagctggcaagcagcagagctgggatctgaacatcggagagggccttggtaaggacggtgccatcctgcctttctctggagcctgaggaggatgagactgacgaacgcccataaaccctttgaagggggctgggcacagggcagggcttgacaagcaggagctttgattctgacccaagattgcagggcagaaggacgcagggcaggagccagacgaggctccagggcacccatccacaccagccctgtgattggaaatgcagagactgctcagcagacctggttatagcgattatgaatgaagcctttgtaaattgtcaagtactggggaaacccaaggcctggtcctccccacccaccctgcacacagcgggtcctctgcacaccaggaattggacagagagaacagaatgtggagggaggtcctgctccatccactccttacctggttggtgaagggcaggcccagcctctggagagcaggcactgtgtggctggcactggccaccagctgcagtgggccacgtcgtggccgagccaccagggctgccaggtccatgctgactccactgtccccaccatggagggccaccctggcctgggtctgggtctctagagacagagaatggcatgggctactgaagacagcttcacctcccttcccagcccaggaacacaccagactacatgagaggccatgccctgtggccctcaaacacaacaccagcaggaaagggcaaggctgccacagcgtgggtgctgggtggggtcaacccctttgagcctccgtgacatcatctgtcataatttgtccctgaggatccaggcctgggtggctccttctctcattgaagttgaagttgctgaaatgacaccttctccaagaagcttcccttgactgcccatctgaagtccctcccagtccttggctgccaggcatcctccatcccatctccctggagtgtggtttccagcacaacctgaaatgacctcgctcacttacttattaggttcctgctccccaaactctcaccccaccagaaggtcagtgcctggggtcgggatttcccttaggacagctcctgacatgcagcgggggtgcagtgagtgctttctgaatgactgtgggatgaaaggcttctctgcagggattcctgaggattatgggaggggtagcctgcagaggaatcagcatgacgtctgctccccacaaatggccactgcggccactgacatccacctgcagccacctggccctggctggagggtcccgtccttcccatcaccccctacagaacaggagattttggctcacagttaggagtttcttctttgacttaaactccctttgctatacagagaaactcatcgggtccaggagccccagagcaaacagatggcgccgattctgtatcagatgccaggttcccgtggggtgcagctcacggctcaggcccaagtgacactcagccaggctccagcacctcccatctggccagcagggtggacgagctccacagccctgagcctcgacttccttatctatgaggtgggcacagcccgcccgcctcaagggacagcgtccagagtgaatggggtaacacacgggagaggaccacttgtgggacatgcaggtggcctcaggaaatgcttccttccttcctcgttcaacattcagccacatgtacctactacatgcagggcacaaggagacaggggacacaatccccacacctgggagcacccggctgtcagagataccaagaatgttaacgacaggcagagcatccccaggaggtagggacaacagactggacagcagtgggagaagggagaagtcactcttggctgggggcggccataccaggcatcctgggtcgggaactagagcggcgtggaggtggtcatccagaatggcctcccctcacttgactgtcatgtccctaacaaaccctgaggtcaactcagactggggacaatttccccatgtgatcctgtcctctgttctcccctcaggaggctaacggccaaaaataaagtgttttttttgctgttgttgttttgtttttttttttttgagacagagtttcactctgtggcccaggctggagtgctgtggcgtgatctcggctcactgcaacctccgcctcccaggttcgagtgattcttgtgtctcaggctcctgagtagctgggactacaggcatgcaccaccatgctcagctaatattttttgtagagacagggtttcaccatgttggccaggctagtctcgaactcctgacctcaaatgatccacccgccttggcctcccaaagtgctaggattacatgcatgagccattgcacccggcccccaaaataaaaaaatttgaggccaacagaaggactcccctaggggactggggagtccccgggatcctgaatggtcaagagccaagtctccataatctatatgggggtcagaggatggctctgggttcaatcctcactccgtcattaccagctgtgtggcctagaccaggtgactcaacctctctgagcctccattcctcatctgcagaatgggaatggcattcctaaccctatctcataggctcgttcatgcacccattcgatacctactatgcaccctacggcgaagcagacaaaagtcatccctgccctcacagagcacacattctggtgattctagcatagaaaaatgaaaaacaaaggtatttgtatgctacacagtgtgttcaaatgacagagctggggagagggatgggaggggatgggaggaaacggggaggtggaaaagagaggcctccctgagatgccattggaaaaatacctaagggaggtgagggagccaggcaggcgtgtgggagagacacattccaggcagcaggatcagcccgtgccaaggtcctggggccgcagcaagcctggcgtgttgaagaatagcaaggagtggaacaagtagggctgggggctgggagatgaggtcagatgggggaagggtgtggattctgatggctcgcaggcccctctaagagctttgactttcaccctgtgtgatcgggacggctgtactgtattgtgctctcgtgtgcacacagcttgcctggcatgtatgcagtaagtgctcagccagtgctggctcctcttgttgcttttatcttcccaccataatgggttgaaccgtgtcccccaaaaagagatattgaagtcccaccccccctcaccctctgtcctgtgaatatgactttatttaaaaataaggtattcacagatgtaattaagtaaaaacaaggtcatattcaagtcggacgggccctcaatccactgtggattgtttttattttgagacagggtctcattctgtcacccaggctggagggcagtgttgcaatcatagctcattgcaacctcaaccttctggctccagtaatcccctgcctcagcctcccgagtagctgcgaccacacacatgcaccaccacacctagctaagatttctatgttttaagccatccagtgtgtgggactttgttgtggaagtcctagaaaactaatccacctgccttgggagttaggtcattgacgggcaaggctgtcttggttgtcctggagcccagagccacactggacttgacaggagtgccacctgggtccaggcctgaggctgctggtctggcccaggcatggaggaagccagctccccagtcccgggctgtgcgctgagtgccttaccgtgtatctgcagctcagcactaaggcaggcctcgcctgggaaccctgcccacaacaaagcctcactgttgtgccagctccggccggagagctccaggtgcccatcatggtaatagcagctcacagagtagttgaggaatgtgggccccatcaggatgcgtccagaatgctcgaagccggagctgccattgtgaatgtccacagagacctggaatgacaccaaggagacgctggaccaccctgtgcagagagagccagcctgggtcaagctggcactggctcccacaaaccctggggttatcagtgccatccacgtcgctgtgatgggaggaactcagaccctcttgaaggagcaggtttgatgaccaatggggttactccagctaattacacatgcacccaggagaccgtagagaaaacgcggagaaaccaatcaggaagtggggcaggcaggggagagtgggcctggggaagatggctggagaaagactttgggaagaccaagatgtcctggctggtgcgaaacaggttgcaaaccacagcctacatctgttgttgtaaataaagttgttggaacacagccctgcctgtttgtcagaggcatttgaaccagagcaactccatcttgaatagacactgggtaaagtaaggctgagacctaccaggctgcattcccaggaggtcaggcattctaagtcacgggacgacataggaggtcagcacaagatacaggtcataaagaccttgctgataaaacaggttgcagtaaagaagctggctaaatcccaccaaaccaagaaggtgacaagagtgacctctggtcgtcctcactgctacactcccaccagcaccatgacagtttacagatgtcatggcaatgtcaggaagttgccctatattgtctaaaaaggggaggcgtgaataatccaccccttgtttagcatatcatcaagaaatagccataaaaatgggcaaccagcagccctgaattctttcttgcacaagatccaagaaccctcccttgcggtctggatcgagaccccattccggtaacatgttcacatcccattcctgtggctgctttcacaacacaatagcagtagaatggaggcattgtggcagagactgcagggccacagaggctaagacatttactatctggcccttgatggaaaaagtttctcaaactctgctgtgagatgtaattccctcccatgccaccccacaattgtcttagtaaaaccttcagtgaggccaggtgcagtggctcatgcctggaatcccggcactttgggaggcaaaggcggacagatcacttgaggtcaggagtttgagaccatcctggccaacaaggcaaaaccccgtctctactaaaaatacaaaaattagccaggcatagtagtgggtgtctataatcccagttactcaggaggctgaagcggtggaatctcttgagcccagggggcggagcttgcagtgagccgagatcacactactgtactccagcctgggtgaaagggcaaaactctgtctcaaaaaaacaaaaaacaacaacaacaaaaaaaatatactacaaggctacagtaaccaaaacagcatggtactggtaccaaaacagagatatagatcaatggaacagaacagagccctcagaaataacgccgcttatctacaactatctgatctttgacaaacctgagaaaaacaagcaatggggaaaggattccctatttaataaatggtgctgggaaaactggctagccatatgtagaaagctgaaactggatcccttccttacaccttatacaaaaattaattcaagatggattaaagacttaaacgttagacctaaaaaccataaaaaccctagaagaaaacctaggcattaccattcaggacataggtatgggcaaggacttcatgtctagaacaccaaaagcaatggcgacaaaagccaaaattgacaaatgggacctcattaaactgaagagcttctgcacggcaaaagaaactaccatcagagtgaacaggcaacctccaaaatgggagaaaattttcgcaacctactcatctgacaaagggctaatatccagaatctacaatgaactcaaatttacaagaaaaaaacaaccccatcaaaaagtgggcaaaggatatgaacagacacttctcaaaagaagacatttatgcagccaaaagacacatgaaaaaatgctcatcatcactggccatcagagaaatgcaaatcaaaaccacaatgagataccatctcacaccagttagaatggcaatcattaaaaagtcaggaaacaacagatgctggcgaggatgtggagaaataggaacacttttacactgttggtgggactgtaaactagttcaaccattgtggaagtcagtgtggcgattcctcagggatctagaactagaaataccatttgacccagccatcccattactgggtatatacccaaaggactataaatcatgctgctataaagacacatgcacacgtatgtttattgcggcactattcacaatagcaaagacttggaaccaacccaaatgtccaactatcatagaatggattaagaaaatgtggcacatatacaccatggaatactatgcagccataaaaaatgatgagttcatgtcctttgtagggacatggatgaaattagaaatcatcattctcagcaaactatcacaaggacaaaaaaccaaacaccacatgttctcactcatagatgggaattgaacaatgagaacacgtggacacaggaaggggaacatcacactcgggggactgttgtggggtggggggaggggggagggatagcattaggagatatacctaatgctaaatgacgagttaatgggtgcagcacaccagcatggcacatgtatacatatgtaactaacctgcacattgtgcacatgtaccctaaaacttaaataataataaacccccccccccggaaaaaaaccccaaactttcagtgaaatctccaccacctctaccacaatttcgaaggagctacccaggcatgaaggagcagggatgacagacggggagagggcaccctggtcccctgcaacccaaagaatgagccgcggcccagccgtgactgcatcacccgggctgagaaacgcagcatctcaggccccaccccagacctgctgaatcaaaccttcattttaacgccctccccgattatgcctgtgtactgggtgtgcgggaagccctgctctaggcagaaggaccaccacaggaggtccaggtctgctgggctctgatcatgtgccacccaccctctgggatgacagcacagggcccagggctggacttgtcctgagtttcaggggctctgtactgctggccacctctgccaaactgtccccatccaccctgggccacacccaggcctgcctgctaggcctctgctggtgtcaccgctgaccttgatggtgccaaggtcagacgggccccaggcactcaggctcagggcagatccagagactcagtgtgacagcagagaggccaggggtgagctctctgtcactatccacagagcgcttccctgcaccccagccccagtgggcagagctgggaaaactgaggcctgagccctcatcaccacacagctggctccctggactttccccccaggactaggcattcccagggtctagtcaaccctagaccaggggttgcaaactggtggcccttgagctgataagttttatgtggtcactcactctggtattttttgtgttgttttttttttgagactgagtcttgctctgccacccagtccggagtgcagtggcacaatcttggctcactgcaacctccgcctcctgggttcaaacgattctcctgcctccgcctcccaagtagctgggattatacgcatgcgccaccacgcccagctaattttgttgtatttttagtagagacagggttttaccatgttggccaggctgatctcgaactcctgacctcaagtgatccgcccacctcggcctcccaaagtattgggatatacgacatcttgtataattctgtttgtatgaaatttccagaatagacaaacgcatagggacggaaggcagatttgtggttgctggggaccagggaggaggggatgggagggactactaatgtactgatgggtatggggattccactggggtgttgaaaagttctggaacttgcaagcaccaatgattgtagaatagtgtgaacgaccatagcatccccgagttgtatactttaaaacggttttacattattacacatattttactacaacaagaaatgtgaaaagatacatatgatgtggagggtttgagacgtggcaaacactctgtagttccccacacagcccagtgacacatttcagttctccgcctgcccccaaagtcttcgagtttgcaacccctgtacccaatgcacacaggtttatcattgaaacagcgggagcaggctgggtacatggcccatgcctgtaatcccagcactttgggaggccgaaacgggccgatcacttgaggtcaggagttcaagacaagcctggccaacatggtgaaaccctgtctatactaaaaatacaaaaatttagctgggcgtggtggtgggcacctgtaatcccacctacctggtgggctgaggcaggagacacttgaacctggtaggcagaggttgcagtgagctgaggtcatgccactacactcaagcctgggcaactgagcaagactctgtctcagaaaaggaaaggaatgggacggaaaggaacagaacggaacggaaaggaaaggaaaggaaaggaaaacgaagcaaaggaaaagaaaggaaaacaaacagcagcaacagcggcagcagctgcgatcactgcctgagcatgcagcaggtggcaaggcccctcacctgttttatgtcacctgttttatgaggcaggaactgctactccatataggtcaaaaatgttgactgagcacctactacatgtcaggccccgtctcaaacctggggatactaccatgcacaaaatagaaatgcctgagcccgtgacgctcaggtggcagtggtgggaggcagacaggacaaagagaaaggcattgtgcttcctgcctgcaccctcggcagagacagcttgaagccacctgagctgagctgcaccccagccctgagcgccacggtccgcttgtctcacgatgccaggacatgcccaccgccagcccagctgcccatgacagaggtgggcttgcaacccttgggtcctgattgatgtttacctgtgtttgcagatgggaccactcgatgaccatcaggttgagctgatgcccctgggaactgggagtccaggtgcatgtcaccagggatgtggggggcttttgaaggagggggaccatgtgagtatctcctggcagcgaactcagctccgggccacacctcagacggcccctgtgatcaggctgtgccagccccgctggaggggcccactatgtaccacaaccatccagcccaggacagagaccccatacctcgagaggctgcccagcgatgtcccctcggcaccatcctaacagctgggtgggcgaggcgtctccactgcagttgacctacagagaccagtgggtgggaaggggctggcttcttccctgaccccagagtgaaccgtcgtggatgccaagatcccacttgaccccgccaccctttggggaagccaccatgggcaaataaccccaaagagaggtttgcacagggacttgagggcgaagccacggcatcatcatcaaatgaaggtaaacggagctcccagcatgcagggcctccacgccaggcacggtgctaactgaaccacagagtaaccatgggaggaggtggcagatgaggaaactgagtcacgcaagtcagggaaagaggaagcatcttgcatgtggtcacacagtcagcgacggtgcagcctggcttcaggccaggagccctgctcactcacattccctctcccaccatggacggtttagccaccctcagggacaggcaccgaggtggtttcctgcttttcatttctgagaacaataaagaggacagctgcgggtgtgaggcttccccagggtaggggccccagggaggaactgagagaccagggcctctaccatcttcattctaccagacagggcctggtgcaggctgcagcctggcccatgtgggcacccaacccactcacctccagctgggagggcagggtaccctgcagccccgagaggccatggtgcagccccagcaccagcccctggcggccaccctctgccttcctctccagggctgcgcggagctgctcgccatccaagatcaccgtcagcccggccgccagactacgtcccacactctgggcagaagcaaagctgttgggtgtccctgggacccactggcccccgagagggcccgggtgcagccccctcctcactcacctggaagtgcccgtggccatctaaggagaaggggaggccccagtgcttgaggctgggcatggtgtgggtgtgacggaggctggcatggagctggaggcccgaggactcgggggtcacgtcctccaggccaatggcaccgtctagctgagcccccgcgttccacagcgccaggcgtgctgagcagttggaagccacgtgggtgagagacaggagcatccctgcctcggaggggagtcctgggggaagaggccagcgggcaggagtgggcagagccccagagaccactcaccccagtccaccgcatttagtcaggatgggaacatgacgggggcctggccagcacacctgctctctagagcatcccctgagccccatagctccaggtcctactgcacccaatacaccaggttaaaccatctgaaactgtccacagttcacagaaatggcgatttcatctggtccaacctcacagcacaattgccacatgcagccggtgataagacccatgtcccttaggacttccagctccccgaggaaaggacacaaatctcagagggaaacaggggtctgattgtgtgtcctcccttcgctgctgcacctgggggcccctccaggcctggaggtaacttctgagaagctcgagcaggggctgttgggattatttcatagctgcggtcccagagggcatccttggggtcctggctaggccaggtatccacgctgcacaagctgtcccagggaattgggggtgggaggcctggagggctgatggcagcggctgtcaccagctgatttgaagcctgtcaatacggtaacaactggtgccctgaagctgcatgttctggctgaatgacgtcccagggaaggagacacaggtgtgccggggaagccagcaggggaaagaaatgaagctggaatgtgaatttgggggttggaggctcatttatcccccctcccttggctccaggacttagaagtcttggaggaagctgttctgcctggaccactcgtcctacctgcatcactcagcgtgctgatattgtgtgtcgggccacccgcaagctgtccgtgccgggggccccaggagcaggcgccacccagagccaggctggctgcatgggcccggatgctggcctgggccctcaggttcctcgtctgggcctgcagccggcccttcagctggagctctccaggcaaggcctggctgctgttctgggcaaggacacaggtcacgctgcgcacgctggtgccgttccctgccttctcatgctggtcccgcaggaggaagcccagcacagctgagtcagcagtgacactgagggtgcctgcagagaatggtggagaagaacagagcagaggcggctcagggaaatgagctgctttggagaggagggaaaagaatttgggggtaagaagttgctagattcatgatgtcgcacttgtaactcatgtcagaaatggcacatttgtgaaatccatcagagtacaccagctccctcccaggatactctgaaaatcaagcgacctaattcgcaaaataattcagaaaatctgaacagctctatatttatatagagctatacgtttatatagctgtatacgttttccaaaaaactcccacaaagaacgctccagacgtcttcgctggtaaaatcgatcagacgtttagagaacatcaccaccaatctcatacaaactcgttcagaaaagagaagagatgaggatactcgacttggtttatgaaattggcataaacctcataccaaacctgacgaaagctttgcaaaaaaggaaaattacagcccaatagagctatgaacacagacaccaactttcttaacaaagtattaggaaaccaaattcaattacatatagaaggaaagaaaaaaatgcagggaatcccactaaagcaaggttggtttcataccgaagtccaatttaattcacactattaacaaaattaaagtgaaaaaccatatgaatatgtactagattcagaaaaggcatttgactatattcaacacccattcttaagaataaaaactggccaggcgcggtggctcacgcctgtaatcccagcactttgggaggctgagacaggcagatcacttgaggtcaggagttcgagaccagcctggtcaacatggtgaaaccctgtctctactaagaatataaaaattagccaggtgtggtggcgcatgcctgtcatcccagctacttgggaggctaaagtaggagactcgcttgaaactgggaggtggaggttgcaggttgcaatgagcagagattgcaccactgcactccagtctgggagacagggcaagactctgtctctaaaaaacaacaacaacaaaaactctgcaaaaccaatagcaaacattaaaattatttgtggaaattttgaatgttttctttgtaagaatgagaacaaggtaagaatttttactcttagcatatttattcaatattatatactgtatttcttagctactgcaataagaaaaaaaaaaacctaaatggcataaaaatatcaggccaggctgggtgcagtggctcatacctgtaatcccagcactttgggaagttgaggtaggaggattgtttaagctcaggcattccagaccagcctgggcaacaaagggagaccccacctctaaaaaaaaaattatctgggcatggtggcaggtacctgtagtcccagctacttgggaggctaaggcaggaggatgcttgagccatgatcatcccactgcacttcagtctgggcgacagaacaagaccccatctcaaaaaaaaaaaaaaaaggcataaaaatcaaaatggaagaaaatatcctattctagaatatataaagagtatctacaaatcaataaaagacaaacaatttaataaatgggcaaaaaaaaattcatgtgacctgtctcaaaggaagctacacgagcaaataacacacatgaagcagtgcttggccaggcgcagtggctcacacctgtaatcccagcactttgggaggcctaggagggtgggtcacctgagctcaggagttcaagaccagcctgaccaacaaggagaaaccccgtctctactaacaatacaaaaaaaaaattagccagacatggtggcgcttgcctgtaatcccagctacttgggaggctgaggcacaagaatcgcagaggttgcggtaagctgagatggcgccattgcactccagcctgggcaacaagagcgaaactccatctcacaaaaaaaaaaaaaaaaaaaaaaaaaaaagtgctcaacataattaatcaacagggaaatgcaaattaaagccacaaggagaaaccactagacactaatttgattattttttttgagacagggtctcattctgttgcccaggctggaatgcagtgccacaatcatggctcactgcaatgtccacctcccaggctcaagcgatcctcccaccccagcctccatgtagctgggactgtaggcatgcaccaccatgcccaactaatttttttaaaatttttgtagcgacagagtctccctatgttgcccaggctggtctgaaactcccaggctcaagcaatctgccctcctccacctcccaaagtgctgggattataggtgtgagccactgctctcagctgagatgtgcacatttctttttatgtaaattttatatcagaggaacgaagaaagggaaggagactaagagcagggagaattgtaagcacattttgagctttagtccatgatgtgtattataatctatttgggtgtaaggtgttctgatgtctacaactcactctgaaaagcgtcaaaaacagcatagatggatgtgttacaggaaaggggtccggatccagaccccaagacaggcttcttggatctcccacaagaaagaattcagggaaagtccacggtgcaaagcaaaagcaagtttattaagaaaggaaaggaataaagaatggctactccagacagagcagccctgagggcggctggttgcccattattatggttatttcttgattatatgctaaactaggggtggattattcatgcctcccctttgtgtttattttattttttgagactgagtttcgctcttgttgcccaggctggagtgccgtggcgtaatctctcactgcaacctccaccttccaggttcaagcgactctcctgcttgagcttcctgagtagctgggattacaggcatgtgccaccacgcctggctaatttttttgtatttttagtagagacggggttgcaccatgttggccaggctagtctcgaactcctgacctcgggtgatccacctgcttcaacctcccaaagtgttgagattacaggcgtgagccaccgcggccggcccatccctcccctttttagaccatatgacgtaacttcctgatgttgccatggcatttgtaaatgaccatggcgctggtgggaatgtagtaatgagaacgaacagaggacgctctcgtcaccatcttggttttggtggcattcggccggcttctttactgaaacctgttttatcagcaaggtctttatgacctgtatcttgtggcgacctcctatctcttcctgtgactaagagtgccttaacctcctgggaacgcagcccagtaggtctcagcctcattctacccagcccctattcaagatggagttgctctggtttacacacctctgacagatggagagtggataggggataaagaaaataacacaaaatgcgaacaattataacatttaggtggggggcacgtgggtgtttgcacacaattcaacttttctatatgcttgcaatcttgcatgggaaatgggagggggagggggagaagccatctcgtagggactcccacggggcaaatctaggaaaatccggcactgaaataatgatcatgacagattactgaataaaataagaatccatgagtccctactgaggttaaggaaggaaagaaggagggtgatatggtttggacctgtgtccccaacaaccctcatgttgaattgtaatccccagcgtcaggggtggggcctggtgggaggtgactggttggcctgggagcggatttcttaaacagtttagtagcatcccctggtactgtcctttccatagtgagatctggctgtttaacgtgtgtagcagctcccccctctttctcttaatcctgctctggccctgtgacgtgctggcagaggagaagatgcaccatacttccagtacagcttgcagaactatgagccaacgtctttgtaaattacccagtctccggatgtgaaagcattgcaaggacagactaatatagaagggaagggaagggcaaagggagttagcagggaaagcattctgccctaagcaataatttattttttgagacagagtctcactctatcacccaggattggagagcagtggtgtgatcttggctcactgcaacctctgcctcccatgttcgagtgattctcgtgcctcagcctcctgagtagctgggactacaggcgtgtaccgccacccctggctaatttttgtgttttcagtagcgacggggtttcaccatgttggccaggctggtcttgaactcctggctacaagtgatctgcccgcctcagcctcccaaagtgctgggattacaggcatgagccaccatgcctggcctgtaagcaataaatttaaaaaaaaaaaagaattagaaaaatccccatttggcaatcatcataacagtaacagactcagacaagcatcatcagtgggtgctaaaactaggagggtcacaattccatgagaacagagaatacttacatgacttccaagtatctcaccccagttacttattaattacaaaggaaataactaaaagctttacagccaagaaacctggcaaccctaccttaatcaagagatcaaagctaatgtcaccaacgttggacaaacagacagaaggtgccacctgacaagaggctgcctcatttctgtggtgtcctaccaacaggctttcttgaaagcaggcatcgggaagtgtcactcaaacccagacggagggctgtttcacaacatgactgcccggtacccttcaaaatgtaaatatctgccaggcgcggtggctcacacctgtaatcccagcactttgggagtggaggcagatcgatcacttgaggccaggagttcgagaccagcctggtcaacctggtgaaaccccgtctctattaaaaatacaaaaaaaaattagccaggtgtgatgctgtgttcctgtaatccaagctactcgggaggctgaggcagcagaattgcttgtacccgggaggcggaggttgcagtgagctgagattgctccattgcactccagcctgggggacaagagcaaaactcagtctcaaaaaagaaaacgaaaaaaaagaattatcatgtctgcaatctaggaaaacacaattcaggaataaaataatatgttaaatatacatacatatagagagaatatgagaatgataagggaaatgtaaaatgttagtaactgattaatctgggcaaaggggctgtgcgattctttgcattgttcttgcaacttttctacaagtctagtgttacgtcaaaataaaaggtattccaaaatatatgcctgggaaaccctgcacccaactctccctcctggagatatacaatgtccattagcgtgttaaaggctctgacaagtcctgcataaggaaccctattcagtttttagtgagcagattttctttgtcagaatgcatgttcatttctcacaaagggaaatcatccatacccctttatctaaacctgtagatatgccagtgtgagatgctggagttggagcatcactggacttgggtggaaatgaatctaccttgcagttccaaagaaagtgcttgccgctgcccccatggcgttccccaggccctcaccctcttgaagtgtctccttctgcttcagccttcctgtgagtgtcaggaggcggggcatcgctgcccagccagccaccgtgtgccgggtttggctctggaaagtcaggatccggcctcccctccattcctcagatgccttgaggagcaactgtgctgtgttctggtccagcagtgccttggaaaacagccaaatcctaggcagcgaagtaagggggttaagatcatgggctttgtagtcaggcaaacctgggttccaaccccaatgctgctgctcactaacaggatgacctgggacaaggacataacctctctgggcatcagtttctccttctgcaaagtgggaataaagtggacatactgatattgagctttttttcatttttttcctaggagacagagtgactctgtcacccaggctggagtacagtggcacaatctcagctcactgcaacctccgcctcctgggttcaagcgattctcctgtctcagcctcctgagtagctgggattacagggacccaccacaacagctggctagtttttgtacttttggtagagatggggtttcaccacgttgcccaggctggtctcgaactcctgacctcaggtgatctgcccaccttggtttcccaaagtgctgggattacaggcatgagctgctgtgcctggccttgaactgatattgatattgatactgacaggtactcaaccaggtgtgaaacagtgtgtttgcacctatggccagctcttcccatactctcctgcaaggtgactttgccactcctgcattaacacgtgagatctatgtcctctccctttgaatcaggactggccttgtgacctacgttttggtcagtagaatgtggcagaagtgacaatgtagaactttcaagattgggccctaagatctgcaactttcaccttctcacatgaatgctgcctcttggaacccagccacctggtaagaagtctgaccagcctgagaccgccatgatgtgaggaagcccaagcagccacttgaaaagagagagggggatgcacatggaagagcaccgaggtgccagacatgtaaaggaagccttcctggacttcccagtccacccccgtcctcagcccatgcacacatctggctgggaactgactcagctgaaggctgatgtcagccaagagtcccagagaatgacccctgccaaagccacacagaacagaactgcctaagccttgtgtaagttcctgacccacagaatcgtgagcaaacaaaatggttgttctttaatctctatgctttggagtagcttgttatgcagcaacatctaaccaacagactctgacatgcactgtgcactttagacacattgtctgactccttacaaaagccctgtgagttttgagaatattatgaaccctaatatacagatgaggaaacaggtagagagagagtaatatgcccaaagctcaaataagcagttagcagtacctaaagcatagggttgtttagaattaaacgaactttggaatataaggttcctactccagggtcataatgagtgattgataaatgtgagaaaaggaacagccccaagaagcttgctgttaaacttgctggaaaattggggcaggggacacagttcctatcatcacacagtgagttcctacatgacaccattggagagatttcccttgagcttcaccaccaggaacaagatcagccatgcatttcgtggtgcacagctgtggactgtgtgtgtgcacttcctgagggccactgcaaatactactacttgttggtttctccctttgcattggctgctaggaagctcagagccaaatcttcagctgagctctaaataacacagaggaactcatggcatgaattttgtttactgaaactactttgagcagcttcccatttttcttttcctttccccctagcttcctcgtgtatctttttaaaatctagaacaagggttggaaaactacagcttgtgggccaaagctggcccaccacttgtttttataaataaagttttattggagcacaatcatgcccattatttatgaattgtctacgacactcttgtaccgcaatggcagggttgagtagttgcaacagagaccatatggcccacaaagctgaaaatatttcccatctggccttttactgagagtctgccaactcctgacctacaacaaggtgcattttaataatttgcctcgaatccttttcagactggggataaggatgggcagttggacaggtggatggacagacagctgtggtggcaatgctgaagacaaggttatctaggaccatgtccacagcccagggtctccttaaatccatgccaaagctggaacaaacatgggattgcagaggaaatatttagtggagacccaatttgtaccagaatgtgcagtactcaaaataccagcataatattgtgatgtaataggaaatatatatttggtctctgtccctaatccttgacacagagctcctaatcccttggaactagagagtctcttttgttgacaggagcatctttggttctaatgaggtgactcttggtgggttcctggacaggaactggtcaacagaaagatcaagccatgattagaggttggaactttcagccccacatcccatcctctgagaaggggagaggggctagaggttgagttaataagcggtcatgcccgcatgatgaagccaccatagaaatccctgaaccatggggttcacagagagcttctgggctgaacacacagagggtggtgagcccagagagggcggggaagcccagcatcccttgccctataccttgccctatgcgtctcttccatctggctgttctcaaatcatatcctctataatcaatgaataaatatatgtaaaatgtttctctgagttctgtgagccattttcgcgaatgatcagacacaagatgggaggaggttatggggacctccaagttacagccagttggtcaggaggcaggggaaggctcagaagcagagggaggacaggaagggtctataggaacctgagtgagggggaggatccctcctccaggaagccctcccgagccactccagctctggagagctcaccaagcacagtgggcagcagaacctaggttcttccaccgttatgagagcattcatggtatataacacaaagaattataatactctataagtaataatgtataaagggtggctcatgcctgcagtcctggcatgttgggaggctaaggctgggaaattgcttcaggccaggagttcaagaccagcctgagcaacatagcaagaccccgttcctacaaaaaaagtacaaaaattatccaggtgcggtggtgagcctgtgattccagctactagagaggctgaggggaatggtgtctgaagttgggggcagtctcgcacacttaacatgtggggtctgatgctacctccaggtatatagagtcagaaccgagaccatttgtaggacacccagttagtgtccaccagagaactgcttgatggggaaaaagaccccctgttcctggccacagaattatcctgtactgagcattaagaggagagcagcagaaaagagtttgttttttccgattacacctgcagcaaagatggtagccagctactgagcatgctcactggccctggcttggaattcaaatgcagggctcagttcaccattaggacaaccctaagaagcaggtggagaaactgaggcacagaagggcgagtggtcccagaggcagccgtggccgagttgggacttgaacccaagtggtcacccctggaccctaggctcctgagcaccccaccatagtggacacatgagtaggtaaatatatcctcagacatgagaccagacggagacgcacattccttgggatcactagtgatttttatttcattcctttttacatgattattattattactattttagagtcaggctcatttcactattgcccaggctgggctgcaatgctgcaatcttacagctcgctgcagcctccaactcccaagctcaagcaatcctctcgcctcagcctcccaagtagctgggactacaggtgcatgccaccacatctggctattttttaaaaattttctgtacagatggggtctatgttgtccagactggtcttgaattcctgagctcaagcaatcctcccacctcagcctcctgagtagctgggactacaggtgcaccccaccacacctggctaattttttttattttttggagagatggggtcttgctatattgtgcaagctgctcttgagctcctgaactcaagcaatcctcctgcctcagcctcccaaagccctggggtatgactcaaggtgcccagccctttatacattatcctttaagccatctacaacgaacactctcataacaacgcaaaaaagaaacaaagggccaaagtgaagaagtgaacaccaccctcttttcatgccctcagtggcaccaatggggctgacttgggcgtggtctcaggggaacagaagaggggcctctgagtgaggatctcccatatcccaggacaccagccttttggcctctgtggtctccctgcctcctcgcaggccacctggggaccattaccttgctggggtgatctttgcagacagctgcagccgaacagccctgggggcactgaggacagcctggtggagaaggacactcacaccccagccccggctgctcctccgagtgtcctggctggcgtcgacctccagcagaaccagctcccggccagacatttgcacagatagagacccgttgaggctgcgcactctgtagcgcccggcagctgcctgcacctgcagggaggcaggggagggacaggaagggtctatgggatcctgggtgtgggggagggctgcctccttctccatgaagccctcctgagccactccaactttgagcactcaccaatcatggtagacagcacacaattaagaggagaaatgagacagagggaggaatgggggagatagcctaccctggctccagctcctggcccaggggtacagtcccatcttgtcctttccaccacatgtgaaatgggagttcttactgtacaaatggggaaactgaggcactgaaagggtcacatatgccacctgagtctgcctagctctaaaactcgtgctggtgcctgaagggggctggtgggggaagcagaggacatctttgcaactcctccacagaaaaggaggccccagagagtgccccacgggaaccagaggacccagaacttctgaggttcaaagaggatggcatctgggtacccaagtggtcaggctggggtgaacatgtagctagtcccaacaagggtgctgaagggagcagtggggaggggagcagtggagggtgggagcagagaggtccaaggctccaccagctcccaagggacgtgagcctatccctttcctgatctgggcctcagtttccccatctgcaaagcaggtttagccccatggttctcaatccagcctgtgcattacaatcacaggaaaagtttttttttttttcttttctgttctgagacggagtcttgctgtgtcacccaggctggagtgcagtggcacaatctcggctcactgcaacctctgtctcccaggttcaagcaattctcctgcctcagcctcccgagtagctggaaatacaagtgcccgccaccatgcccagctaatttttttttttgtatttttagtagagatggggtttcaccatgtttcccaggttggtctcgaacttctgacctcaggtgatctgtctgcctcgacctcccaaagtgctgggattacaggcgtgagctaccatgcctggcctggaaaggttttaaaagaatgcctggtgcttccttagatgagctgctgaataaaacatgatacacccagacaatggaatattatctagtgctaatataaaatgagctattaagctgaaaaagacatggaggaaacttaaatgtatgttactaactgaaagaagcccatctgaaaaggctgcatactgtattccaactctatgacattctggaaaaaggcaaaaccacagatagtaaaatgatcagtggttgccagggggtggagtgtaggaggagggatgaaaaggtagaacccagaggattttttagggcagggaaactgttatgaatgatgccgtaatggcagatccattacgttgtatcaatctgtcaaaatccacaggctggcagggcacgatgactcacacctgtaaccccagccctttggagaccaaggcaggaggactgctgaaggccaggagttgagaccagcctgaacaacagagcaatacccgcatctctacaaaaaattaaaacattagctgagcgtggtggcatgcacctgtagtcccagctactcagaaggctgtggtgaaaggatggctggagcctgggtggtggaggctgcagtgagccataatcatgccactgctctccagcctgggtgacagagtaagaccctgtcttaaaaattaaaattaaaattaatgtttgagctgggcacagcagctcacaccagtaatcccagaactttggaaggctggggcaggcagatcacttgaggtcaggagctcaggaccagcctggccaacgtagtgaaatcccatctctactaaaaatacaaaaaattatctgggtgtggtggcgcatgcctgtaatcccagctacttgggaggcggaggcacaagaatcgcttgaacctgggaggcagaggttgcagtgagccgagatcatgccacggcactccagcttgggtgacagagcgagactcggtctcgaaaaatactaatgataataatgtttgcactcattagatgacccagcatccaagcttccagggcaacccacccccactccccgatgagttcgggggatcgatcgcatgcgctctgaaaccagaatgcctgggttcccacccaagatcttccactggtgagctccatgatcttgggcaagtcacgccacctctctaaatctcagagcctcacccacaaaatgacaacggtgctccatgcccccccacaatagcatcatgaggtgaccatgagctaatccacaaagagggtttagaacagagcctgccacgcaatcatttcacagacatcagctcctggaacaaatggttaatatgatgacatttcctccaatctaagatgccagcagctctcaaatgggccagatctctgggaactccacaaaagcaaaaggttgctagtgaaacggtgacctgtgtcaaggtgaagatacagactgacttcagggacatcaacctgtgaaagctcatgcctctaagaataagcagttccctccattcagagccattctcgggctccattcaagtttctaaaacccaatacacagggaatgaacagcaggtgtttaaaaaaatgctatcagggctgggcgcattggctcatgcctgtaatcccagcaccttgggaggccaagggaagaggatcacttgagcccaggagctcaaggccagcctgggcaacatagcgagaccctgtctctgcaaaaaaaaaaaaaaaaaaaaaaagtacaaaaattagctgggtgttgtggcaggtgcctgtggtaccagctactcaggaggctgaggtgggaggaccgcttgaccccaggtggtcaaggctgaagtgagccatgattatgccactgcacttcagcccagctaacagagtgagatcctgtctcaaaagaaattttaaaatgctatcgggctaggtgcggtggctcatgcctgtaatcttagcactttggaaggttgaatcagaaagacagcttggggccaagagtttaaaaccagcctgggcaacatagtgagaccccacctctaattttttttattgctgtcaaattaatggtgtgccccatgtctcctgagggcctcatccctgttgggattccctatttacacctccacatccttgaattagccaccccctaatttctgtgcacacaccatgcacagcctgctcaatgaagccacaaatttggtgggggggacagggctcccacctggatgtctttctccacctccaaaatgccccgggtcaacaaagccctcttgaaggattacatggcttctcccaagcccaaatatagggtagagtttggaggaaaactctgcttctgcccattttcaagagtgaaatgtgatccttcacccccttcagcctggaccatcacttccaaatgatggatgtggaaacctccctgccatctgttcttgattctacagggctgtttggctaagcacaacattgcaagtgtgggctccctccctcgggcccccatcctgccttctttctgcccatctcccagcaggccagctgctcagagacaacccttggcaggcgagtcaaggtcatctccaagggagcaacgtccacacctggaagtttggaggaaatgttggtccgtgaggatgcctgagttggaagaaaaatgcaaagtcggagtcagatccgttcagctggaccgaggcctgttgcagggagagttgaagaggggtcagagggaacagagagagagatgcagaacactaggaggtggctactgggcaaatgcatcccagaatatgcccaaagctcaaaccagaaacttctgtcctcccttaatattcctcagccctcaatcttatgcaggctgtgctactgaaaaaggttgcttaggaagtgacatcctggatggggggctgggaagaccactctggaaccccctactccctgccatgttgcctgttcatgcctcccacagccacaccaccttctacttgaccctgaccttgaaccaggcactgtgctaccaggttcacaatgaccacctcatttaatcctcagcagtgctttgctgggttgctgttaccatcccatttcccagctagcaaaactgaggctcagtgggattcagtaattcaccgaaggttacacagctagttaacagtggaacttggaattgaacttgaacttatataacactaaaagcccactagattgaaagctcctcagagatgggaacagagatggggacagtgtcacccagcagagatacaacccatccatgctgaatgaatggacaggaatgaacacgtccacggatgaacaaatgaacagccatgaatgagtaaatatacctacaatggctgctatatattcaccaaactacatttccttttcttcctggacatatagctaaaactacatttcccagcctcccttgcagctaggtgggatcatgtgatgagaacccaggcaggaatgacctttctacctatgggtctggcacataaaagcctcctacataattctccactctctgtccctccatctgcctgctggggcacagccacaaggtggggaggcctggatcctgagagactgcatggagcagagccacgctgaactgcacatgaacactggcctttcacaaagagccaaacattgtttacaacaacagtcaatgcatcctgactaatcacacacacactgccaaaataagggctgtgctgttggctccccagggtcatgtctcctgccacctcctcagacatctcatacagggcaccttcactaaaggttattaagacccggcctccctcggcaagggagcagaactcagtctcctgacctgggatgtgacgttgtgattgacggcagctcgtgcatccatgccaaagttgaatgttccttggggactctgtctaaagatgatgcccccatccaagctcagggcctgggggaagctcagctgggaagaaatagacaacaccctttacttccgctaacagccaagctctgggtggagggcacaaaccagtgtctgcccaatctggggacccatacctggtaggaatgggccaagtccagggccaggctgtgccggatttccccatgctgagatctgtcatgatgcaaacccttcaagtgcaggacaactttccggtggactttcaaagtggcctcgacctctctgttcttagcctgggtgtgtgagaaccaggggcactgagagaggtctcatcccatctctatgtgcctgcagaagctaccctgggaatccagtggtcagaagaaagtagtccaaagattgatgggttatggagcagtctacactcttccacttatagggcaggaagcggggatgggtacacaggaatggtaaacttcagtgcctacaggtaagattagcagggtgggcttgatggaacaaatgtgaatgtgtcttgctcaaagaaagtgccttgggagtagtttattttgttcattgccatattcctaatacttagcacaggtcctggcatgtagtaggtgctcaataaatatttggacaaatgcagaatcactagttatagcctgaaaccccaaggtcaaagctgtgctagagtgaaagaatgagtaactcatagtggagctggcagaagaacactcattgcacgatgacatccatgtcctcatcactggaacctgtcaatatgtgacctttcatggcaaaagagactttgcagtgtgattggattgaggatcttgagatgaggagattatctgggtggccctaaagtaatcacaggggtcctatgagacggaggcaggagggtcagagtcacacagagactggaagatgccacgctgttggctttgaaggtggaagaaggggccatgagccaaggcatgcaggcagcttccacaagctggaaaaggaaaggaaacagactctcctctggagcctccagaaggaacacaaccctgctaataccttgattttagccacgtgagatccattttgggcttctgaattccaaaactgtaaaatctgtggcgttttaaaccactaagatttcagagattcgttatggcagccatagcaaactaatacacaattactccatcatttattcactcaacaatcatttagcttctgccacaggccaagtacacagtagcatgttgccatcttttcctacctgtgttgactgagaagttaaaaatgcctgccaaggagctttatcactggagtgcatctttaaagggtgctcggctttactttagaaccaagatggaggaagagaaataagggtccaagacgagagaaaaatgtatgtcattaaacagcttattttattctattttatattttattttattttagagacagcctcgctctgtcacccaggctggagtgcagtggcgtgatctcggctcactgcaacctccacctcccaggttcaagcgattctcctgcctcagcctcctgagtaactgggattacaggagcccgccaccatgcctggctaattttttttgtatttagtagagatgggggtttcaccatgttggtcaggctggtctcgaactcctgacctcaaatgatccgcctgcctcggcctcccaaagtgctagtattacaggcgtgagccatctcgcccagcctagacacggttttaaaaagagcagacagctaaattatatgaaactaaacgactgccatttactcagtcagaccctgttgttgtcagctgggatttgaggcttggtgtggtcacaccgtctgattttcttcttataaacactggaaatctgggttttactcaaaatcttctgattttcaatggtagcaattaatttccttaaaaaatttaaatgctaagcagaccaaacaaaacccatctgcaggctgaatatggcccatggcgccggctctgcaatctctggtttaagaaacagcaaacaccatcgggagccacttctgcaggtgtctaaggctgtcatcctgccatttgtttctccctagaagctccaataactgtactaccttatccccggggagccacacgcagcctcgtttaactaatggtgaagggagcccccagaaaggtgggtctcaatgctcaacagctgcctggttcaccctccttcccaggggctgttgtgtatcttgcaaatagaaatggccgggcgtggtggttcatggctgtaatcccagcactttgggaggctgaggccgggggatcacctgaggtcaggagctcgagaccagcctggccaacatgcagaaaccccaactctactaaaagtacaaaaattagccgggtgtggtcatgggagcctgtaatcccagctactcgggaggctgaggcaggagaatcacttgaacccaggaggcagaggttgcaatgagccgacattgcgcagctgcaccctagcctgggcaacagagcaagactcgatcctcagtctcaaaaaaaaaaaaaaaaaaaaaaaaaaaatgatcggaggggtctgtgcatgaacctgggacgtggaggttgcggtgagctgagatcaagtcattgcactccagactccagcctagacaacagagtgagactctgtcttaaaaaaaaaaaaaaaaaaaaaaaaagagagagagagagaaacaatgactatcttccttgcacacagtagatgctccataaatgcttgctgaaaaatacgatgctctcccagagtatcaactcctcctagaggtgtcaggaagaagacccggatggggttctagtaggcattttacaacgctacattgtaatcgtcacagccactgcatagagatgagtactgctgctcccattctgcacacaaggaaactgaggtccagagagatgaaataatttgccaaggacacacaggcaaaaacaagtttcacccctagggagccacatgtcaagaccctcagccaggggtggtgactcttatctgtaatcccaacactttttttttttttgagaccaagtctctctctgtcaccaaggctggagtgcagtgctgggatctcggctcaccgtaacgtctgcctcccagtttcaagtgactcttgtgcctaagcctccggggtagctgggattataggcacctgccactatgcccagccaatttttatagttttttttttagtagagatggggttttaccatattggccaggctggtctcgaacacctgacctcaagtgatccacccaccctggcttcccaaaatgctgggattacatgtgtgagccaccacacctggcccaatcccagcactttggaaggtgaggcaagaggatcccctgaatccaagagatcaagaccagcctgggaaacacagtgagacctccatctctacaaaacatcttaaaatgagctgggtgtggtggtgcacacttgtggtctcagctacttaggaggctgaggtgtgagggtcacttgagcttgggaggtcaaggctgcagtgagtgagccatgatcgcacccctgccctccagcctgggtgacagagcaagaccctgcctcaaaaaagaccctctaagtcaggggtcagcaactacagcccctggtccaaatgtggcctgtttttgcaagtgaagccctgttgggacacagccacgcccgttcattacgtattattcacggtgctcttgaattgtaacggtagttatgagtgaacaagacctgaaccatgtggcccatgaaacctaaactagttactatctggttctttccagaaaagtttgttgacctctgctctggatcctggcatgcaatgggtgttaaataacatcatgacggcaactattcattgagcacctactgtgtaccaagccctgtggctacggtggtaaagtactcatggagatcatgagctttccagaggagccagggattgatggatcacacaaaaatagaactggggccaggtacggtggttcacacctataatgtcagcattctggaggccaagatgggaggatggcttagagtccaggagctcaagaccagcctgggcaatatagcaagactctgtctctactaaaaataaaaataaaaaataaccaggtgtggtggtaatgtgtgcctgtggtcccagctacttggtaggctgaggtgggaggatcacttaagcctaggaggacaaggctacagtgagctgagattgtgccactgcactacagcctgggtgacagagtgagactttgtctttaaaaaaaaaaaaaagaactgggatttgtgataggtactaaaagcgaaagctatagggcaagctgggtgcagcggtaatcccagcactttgggaggccaaggcgggcagatcacttgaagtcagaagtttgagaccagcctggccaacatggtaaaacccagtctctactaaaaatacaaaaattagccaggagtgggaatgcacgtctgttatcccagctacctgggaggctgaggcagaagaatcacttgaacctgggaggccgaggttgcagtgagctgagactgcaccactacactccggcttgagcgacagagtgagactctttctccaaaaaaaaaaaagaaagaaaaagatataaggcatcgctagggtaagcacgggtctgtgtgaggtggtctgggggtcaggtgagaggatgcttgagctcaatcctaaaagatgagtagaagggaggaggcaaagctgaaggagagggtgacggctccaggcacacaggacacgcagaggtcccgaggcaggaaagagccaggcgaggaaatgcgaagaggctggatgaggcagatgcaggccacgaagcagggctgaggggacaggactggggctttatcccaagagaggctgtcagagtttgagagcatgcgggtggcagggttgtgctggccttcagaatatatccctctgactgtcacatagactgtactagggaggaccaaatgaaacagagaacccagtcaggagaaccttttttttttttttcctgaggcagtgtcttgctctgtggcccaggctggaatgcagtggcgtgatctcagctcactgtaacctctgcctcctgggttctcctgcctcagcctcctgagtagctgggactgcaggtacctaccaccatgcccatctagtttttatatttttagtagagacagggtttcaccatgttggccaggatggtctggaactcctgacctcaggtgatctgcccgccttggcctcccaaagtgctaggattacaggtatgagccaccacacctggccaggagaacttttttgtgtgtgaggttggggggcgggggagtggtgtctgagtcttgctctgttgcccaggctggaatgcaatggtgcaaccatggctcacagaagcctcaacatcctgggcttaatcagatcctcctgtctcagcctccccagtagctgggactacaagcacatgccaccatgcctggctaattaaacaatttttttttcttttgtagaaacagggtttccatatgtcgcccagatggatctcaaactcctggtcttaagcgatcttctcacctcagcctcctgcgtagctaagattacaggtgtgagccactgcactcagtccagataacatgttttcaatcctattgagcgatgacagcaacttgaaccagggctggctggggtgcaaaagtctctggggtctctgctcttaccgtgtgctgattccaagtaaccaggcacccctctgtgttcctggggatgactttgccatcgtatggatgcatcagacctgcacagacctgggagggacaaccacatacatgtacacacgcatgcagggagtgaggaggcagctggggccttcctctggctctcaggccccttccgggctatgccccagacacactcacgtaggggtgtccggcctggcagcccaggaccatggtctgcagggtttcctctcggccattcaggacaaccctagtctccagggaatagcgctggtgtcgcctatcagctgtgaaggtctcctgcaggaggaggctctgcgggatgggcaggtgcaacgggtgcctggtgtgcagagggaaaaacaggccaaagccattaaagcagctggcagtgccaggggacaattgtgccccacggtctcagcctgggcctgtcacgagcttgcagagttaagactctgccacagagaagagaacatcaggacacctggcagccctatgctttacaatgtggcatccagaacccttcaccacctcactgtgccagagaagtgggcatggctggggtccccgtcgccatttgacagcaaagacccaagaggatagatgacacacagcatctggtgtcacacagactgggattagaatccaggcacggtctttcactagctgtgtgaccttgggaaaaggacttgactgttctgtgcctcagtttccccatctgtaaaacggaggctaaaataatactgattggacacagtggtcagggttagagataacatacatgaaacgaccacaagctccccaagggcaaaggtttctgacattccggttctctgccattttccatgtgcccagaagagcacttggtccatagtatgtgctcaatgaatgtaaatgggataaaaacacgaacgaacactctgccaacgatgctgctgttcctttgtcatcactgcttctgtttaggctgtagctgacttatctaaggccatacagctgctcaatgcatagcccgcagtccaagatggctctgctcgtcctaacctcgtgctgttccctgcacacagggaactgtttgaatgagctcgtctctgggaaatgagaagacgccccaagcagctccaggctaggatgatgagactcttaactctgctcccacctcagcaactaatggagggggcgagggatgtgggagctttcaggggaggtggctcttctctgggatttaggttccatctgggccccagcaggtcagcagagattctccaggtagctctgcccatcctgttccccctggggatgctccgtgctagagaaggggaaacttgcaggggtgtcagctgagcagaaggggcgcacatacctaaggagcaaggccccccgtttccggtacaatgtcctgtcttgcctcagctcctccagctctccttccaactgcaggccccgaggctggccctgggcaccaatccgcacagccgtgagcgacacctgggtcttccggggctgcaacaagatccaggctgaagagagggacgggccagcaggaccaagctgcagacctgccttgcaggaaggcaagaggtagccccccacaacctgcccatcacccccagaaatgactatccgagaatggctactgaactgagccacagcctccaccctgatcagaccacaggatcccaccggcacaccaccatggctagacctccctaggtacccgggggaaagaagaacttggacttctcagctaaaggaagccaagttttgctcctggatctttgctaaagtgaccagggtccatttcacaggccaagaaactaaagcttgtctgggcatggtggctcatgcctgtaatcccaacacttcgggaggctgagatgggagggtaacttgagcccagggctttaagaccagcctgggaaacagcaatacctcgtgtctgctaaaacaaacaaacaaacaaacaaacaaacaaacaaacaaacaaacaaacaaacgtcagtgatgcatggtggcatgagtggcatgtgcctatagttctaactacttagtaggctgagcggggaggatccttcaagcccagacattcgaggctgcagtgagctatgacagcatcactgaactccagcctgggcaacagaatgaaactgtcaaaaaatatataagaaaagaaggaaaaggaaaaaggaaaaggaaagagaaagagaaatagaggctccaggaggcccaaggtcacaggccaagccagtagcacaaagcccttttccatccgaagcagggagagaggtaggaaaccgaggtgagggattcggtggtctcttggctgcacgggcctcctgggttcttacccactccaggtgcctgtaggccgctgttaggttcagctcctgctgggggcctttcaaccagcagttcaggatcttacggtcccggctgttctcagcatggatctcgccctgcactgctgcgttccaggctgactcgagttcgctccagctgtggaagaggctctgtgccaagactgtcactgtggaaacctgcaatgaggtgaggagggggaccaaggcctttgcacaccctatttcctccacctgggataccctttcatctctttcctgcttggtgaactcctcttcatccctcaaaaccccttcaatgccatttctctgacgcctaacctgactggtgcaggtaggctagttttctctacagggccttgaaacaagaagaaaaactcctctctgttgccccaaccctgagcagaaataatttccttttctcctcttcagtttggggagggaatctgatcttgttgggccgctattactagtagccagggtgtctgtaccctgaagggcacatgctggcaggtggccttctctccctgcaccatcaccatggtcttcgggagtcctaggaagaggtgggtgtcatctggctcgtttcagagctaggggaggtagggcatttgcagccgccaccctggcacaagccccccatgggatggttccctgttggccaccatcccttgttcacacaactcaggggtctcaccaggagaagtgacaaggacaagacagggtttgggcgtggctgagcctccaacccaataccagaacttcgtaacactttgtcccatgtcactgatccttggttccccaccatcaacttccccatttcctagaatggcacttccatcccaccagatgcttgggccaagacctcagagccatttatttcctttccttcactccttccccaccactagtccatcagcaaatctggcatctccaggatctggacacttgccggcacctccactgccaccaccccgggccaggccgccatgccctctggttgggtgaagggcaggagccggctagccgaccacaccttgctctcctgtcttggcatcctctgttacacagaggcctcctcatggtccctaagattaccaccgctcttgactccaacctggtgccacccagccctgcctcagaggggactgtgctgccctcggatgagcccaatcaaggcccagaccttccccacatccacgcatcacccagacagtccacccaccaggctccctcagccctgcagatgacactcatggcttttctcccaaacctgttcttgcttctgcaccaaacgtgtgcagagaagcaacatcatgacagtcagtagtcggcatcaaaccgacttacgtcctagaaattttcactctgtttttttggcaaaagccgaatgtccatctgtttccaaagtcccgtttgacttgctttcctattttatatttctctccccgtcatctgccgagcagggatgtgggaaatctagattttctttttttaggtctaattcttctacgtcacttaggaactaaactctgatagttgcaggcactgggagggccagacttcacacacctgtgagctgctatctgcccacagacctcagctttcatccgcctctgcaccagaaaaagatctcagtggcaggggaccagacatatatcgggggccgagcactgctcacccggaggtaggtggtagctgcggtgtaaacctggatcttgccttccctgttggggccctgactcctgcagcccacgctgaccaccaggtcctttagggtccaggccttgcccagcgttagctccaggacagcctggaacacagctcggtgtggccagtatagcctgtgagctgcagagaccatcagccatggactatccaggttcaaggctcctgcaagcaacaaagaaggagaatctggtacacggggtagagaggaagcttctagcaggcagctggaggtcccgagagtctcatcacagccgcaatggacaaatctcaaaactgggaataactaggcatgagggaactttctaggacgttggtaatgttgtgactcatgacaggtgtttggatcacccagatgtatacacctgtcaaaactcatccaatcgcaccatggagatttatacatttcactgtgcttaatgaaacacatgctgaaacgtttaggagtgagaggtatccatgtctacaatttactttcaactgcacggaaaaaataagagggctggatatgcagagagagaggtgatgaggcaagtggggtcaactgttaatagcagaacctagtatgagaggatgctggtaatcactgtaccattcatccaactcttctgaatgcaattttttcataataaaacattggaaggtcaagcgcagtggctcatgcctgtaatcccagcactttgggaggccaaggcaggaggatcacttgagtctaggagtttgagtctagcctgggcaacaaagcgagaccccatctctacaacaaatacaaaaattagccaggcacggtggtgctcacctatatcccagctacttgggaggctgaggtggaggctgcagtggctgtaatggtgcaatgcactccagcctgggcaacagagggagaccctgtctcaaaacaaacaaacaaacaaacaaacaaacaaaaaaccaaacaaaaaacacaggtagaaatgctgagggctgtgaagaaaaacaataaagaaggaatttgataaaaattggttaggtcagcaaaggcttctaggaggaagtgacaatttacctgatacctaaatgacagacaagggggagttgatcaaaggggcaggcaacccacccctgctggagacaggagatttactgtctggggaaactgaggcagacaggctcagatgcagggacaaagacacagtgacgggaaggaggagccgcggagttgagaatagggagacattgaagagtgggcagtctggtccctgcccagttgctcccttcccacgggaagcgggaagatggcaccacagaagaacagaaggaacgcacggatccctggagagccaggtccccacccagttgcttgattgacagggaaacccaccggtctgcacatgccccacctatgtatagcgcctctttccaaacaagttttgagtctccaattagttttctatttcattcatgttctttcaaggtgataaagatcttatttcactttatagatcacagttgtgatctggcaaactcaggccctccagaacatctgtctggttgctcagtttttttgtttgttttttttttttttttgcttttgaggtcatggtcattcatttatttctcattacattgggctgggccaagagtcatgcgccagtgtatagattatgttattctgttgctttcagacagaattgggatccaggttctaattgtctcccaagttcaagacctggatcagaaccagaagagagtggccactgctgcgggaggctaggggctgctggaggaaaggcaggaaacagacctagagctgaccacacgcggggttcatgatcaagggcgcccctctgggtacccgaggatcctgcacacagctcatgggtcagggagcccacagcggcccctcaaagtgaatggggatggcacaggcctgggtttggaactccggagctggaaggacaactgcatctgcccaggcaggacctgaaaacatgttgtccttccatttgtatcccaaaatcctgtgtagagtctttccatgaggacagggccagggctggctcctgggcctctgggtggcctcatgggtcattcagtaaaagtcctgcaaacttgtcaccatctggggacattcctgccagttcttctccatgcccttctgtgtgagacactgggcaactgctttaggccattcctgattcttcttcctcaactcttcaatttcagaagatttctaatcttttaggaagctctggatctccagttactccaaaggtgaattaactggtccgatgagttttctggttcttggtttctttttccttttttacttcctgagggcttctagtcattttagtcagatgtctcactttctccacttttattcctgagttttctcctgggatcctttttacggcagccttagggcctaatcctgggttggcagagaactagcactcactctcccctaatgggatccaggagagtcaagaggtggccaagtgtggaaatgtgttctctcctctctgtttcagcgggtctcttactcgaagtttcataaaaggattttaaggagaatagatttttttaaatctgtgctccagaatatcagatccctaactttgctaaactgctggttttaattaagtcctcaggcagcttctgagtacactgaaaacataattaccctgtttgaaaacagggtaaccaatattttgagcagccgactcaagcataagcacatatccaaggctggcttagcatttgggggaaagcctccaacaggaaatacagaaataaaaagaaaaaggaaactccgaggcaacagataaaactccctgaaattctgtaacttatactctaagagaagacaattgcattcatggaacaggacgctgtaagaaaggaacaacaacaacaaaaaagagctcttgaaaatataagataatccaaaataaaaatgctagtagaagggctagcatatgaagtcgaggaaatcggctcttgaacagaaccaaaggacaaagaaatagaacaaaagagaaacaaggaggccaggtgcggtggcccacacctctaatcccagcactttggcaagcagaggcaggacgatcacttgagcccaggagtttgagacctgcctgggcaacatactgagaccccattctccaaaaaaaagaaaaagaaaaaaagaaaaacgagtttgaaaagagaaacagagaaaacattagaagctcagttttctgaggaccaacatctaaccaataggaatttcagaacaaagaaaggaaattatcaaagaaactgtaagagaaaattacacagaccaaaatgacatgtttccaaattgaaacaccctatgctaaggacccagtacaatggaagaacatagatccataccaaggtacctcataatgagatttaccaccaacaggactaagacgagctcctaaaagcttctaagacagtgagaaaagggtcacatacaaaagatgataaatcagaagaagcatcagatctcccaattaattcaaaacaatggagcaatgccttcaaaatcccaagagaaaattatttccaacctaaaattctccactcaaactgtcccagtagaatgaagacattttcaacatttagggtctcaaaatgtttgtattctgtgatgggttaacttgtgttcccccaaaagattaattgaagtcttaatccccaatccctcccaatgcgaccttaactgaaaatggggtcattgcagatatcattaagtcaagatgaggtcatacgagaataggacatgcccttaacccaatagaactgatgtctctattagaaaagaaaaatctggacacagacacacacacacagggagaatgccacatgacaaaagaggcagagattagagaggatgcggctgtaagccaaggaacaccaagcttcaacatccatcaccaaatgcttggaaaaggcaagggagggttgtccccagagccttagagagaacatggccctggtggctccttgactcaaacttacagccttcagaactgtgaaagaacaaatttctgttgctttaagctgcccaattcagtaattagttacagaacccttggaaatgaatacacctccaatgtatgctttctttggaagctactgaaagatgtactccatcagaacaaaggaataaaccaagagatatgacacaggtttaagaaaaagggattgtgacccagaggagaagtaaaaggaattcccaggttgatggaaaagggaggctgcagaaccacagctgtgcaactggtcgtctttggagcaggactcaggctccaggaagagggtccccaagaaaaataacaaaactaattgaagtcaatgaacaatctgatgtgtctgaccacctggaaaaaagttttgcaatgctgctgaaaattctgtaattagtagacaaaaattatagaaaactaatcaaatagaaaaataaaggcaattacaaaactccagaaaaaaacaataggtcaccatgataggacaccatatatctcagctatgtaagacatttatagttataattgggtaagcatcagatgttaacaaaaggtaactcttttaagaaaatggaagagaatatgtatttgaaaggggcaccaatctaagagttaaattcttatcttctctagtaagaaacctatggagaaggcctaaagctgaaaaatcaagaaataacagcatgattatattatttttaaatatggagaatataaacagaaaaaatggctaaaagaatttagcgtgcttactgttttaagcaagacttggggtaggggccaggcacagtggctcacacctgtaataccagcactttgggaggccaaagaaggtggatcacttgagctcaggagttcaagaccagcctggccaacagagtgaaaccccgtctctactaaaaatagaaaaatttgccaggtgtggtggcacacacctgtaattccagctacttgggaggctgaggcacgagaagagcttgagtcttggatgcagaggttgcagtgagccgagatcgtgccactgcactccagcctgggtgacagagtaagactccgtctcaaaaaagaaaaaaaaaaaaaaagaaaaagagaaacaaacaaacaacataggcagatgtgacaaagaggatgtataaactttaatcaacttttataaactttaatcttttagattaaactttataaactttaatcaacttttagaaaacgtagttcaggtctacacaagagcagagagcataatacaatgagcccccatgggacccagcttcgacaatgagcaactcacagccgaattcacttttaaacaaggtatcgcttcgataaaaataaaaactgaaaaaatggaaaaaaaaattcgtggataaaatttttttttttttttcctgaggtggagtttcactcttgttgcccaggctggagtgcagtggtgtgatctctgctcaccgaaacctccgcctcctgggttcaagcgatcctcctgcctcagcctcccgagtagctggcattacaggtgcctgccaccacacatggctaatttttgtatttttagcagagatggggtttcaccatgttggccaggctgatcttgaactcctgacctcaagtaatccgcccccacacccagcctcctaaagtactaggattacaggcgtgagccaccattcccagccggtggattcattttttaaaagtgacagacagtgttttcgagacacaaagatctgcaaatgcaaaggccctggagtgtgtctggggaacaaaaagaggcctctgagcctgcaggataacgagcaagggggagagtggggtgggacaaggctggagaaggaggaagggcctgacacttgactggcaaaggtaagaagttacgatgtaattataagcatcacggcactcattaaagataaggttttcgtttgtttgtttttaaaattaagacaggttcctactatggtgcccaggctgatctcagactcctggcctcgagaagtcctcccgccttggcctcccacagtgctgggattacaggcgtgagccactgtgcctggcccagtttgagtcttgagttagcctagccaacaaaaggaaaaggtgttccaggaaggaggcatagcttgagcaaaggcctggagatcagaaacctgagctgctagccaaggaggccccacagccaacactcaccttcccacttccacagggtggcccgagatgtgtccttccactgcccgcctgccacaaacagcggccgcccattgtactgcaccttcaggtgactgctgctctccacatagggcaggcggaggctcaagtggtaaagctgcacgcggcaatccacctgcctctcaggcacctgcagcacaaactggagaatgcccacccccccaagatgccaatgggatcatgccacccctggcgtagaatgtgcccgggaagttgaggcagcagcgagccaagattgcactactgcactccacacgggcaacgggagtggaacgcagtccaaaaaaacaaaaaacaaggagcgttggtaaggatgtggagaaatctgaattctcatacgctgatggtgggaatgtgaaatagtgcagctactgtggaaaacagtgtggcagtttttcaaaaaattaaagatcgggccgggcacggtggctcacgcctgtaatcccagcactttgggaggccgaggcgggtggatcacgaggtcaggagatcaagaccatcccagctaacacggtgaaaccccgtctttactaaaaatacaaaaaattagccgggcatggtggtgggcgcctgtagtcccagctacctgggaggctgaggcaggagaatggtgtgaattcaggaggcagagcttgcagtgagccgagatcgcaccactgcactccagcctgggcacagggccagactccatctcaaaaaaaaaaaaaaaaaaattaaagatcgaattaccatacgccccagaaataacacttccaggtatacatacaaaagaattgaaagcaatagaaagaatcgaaagcatcagatatttgcacactcacgttcataacagcatttattcacaatagccaaaaaatggaagcaacccacatgtccatcaacagatgaacggataaacaaaatgctgtctatacagacaatggagtattcggccttaaaaaggaaggaaatttgacacatgctacgatatggatgaaccttgaggacatgctaagtaaaataagccagtcaaaaaaaggacaggacaggcacggtggctcacacctgtaatcccagcactatgggaggccgaggcaggtggatcacctgggttcaggagttcgagaccagcctggccaacatggtaaaacccctgtctctacgaaaaatacaaaaaattagccagggctgggcgtggtggctcacgccagtaatcccaacactttgggaggccaaggcaggcggatcacccgaggtcaggagtttaagaccagcctggccaacatggcaaagccccatctctactaaaaaatacaaaaattagccgggcgtggtcgtgggcgcctgtaatcccaggtactcaggaggctgaggcagggagaattgcttgaacccagaggcagaagttgtagtaagccaaggtcgtgccactgcactccagcctgggcaacaggctgagactccatctcaaaaaaaaaattagccgtgtgtggtggcaggtgactgtaatcccagctacttgggaggctgaggcaggagaatcgcttgaacctgggaggcggaggttgcagtgagccaagattgcaccattgtactccagtgtgggcaacaaaagcgaaactctgtctcaaaaaaaaaaaaaaagacaaacggtatgattccacggctctgtgttagctagagtagtcaaaaatccgaaacagaaagtagaatggtgctttccagggactgggagaaggagagaatggggagtcagcatttcctggttatagacttgcagttttgcaagttctggagataagtagtggtgatggttgcacaagaatgtaaatgcatgtaatgccaccaaactccaaaatggttaaaatagtaaatatggccgggtgtggtggctcatgcctgtaacccagcactttgggaggctgaggtgagcggatcacctgaggtcaggagttcaagaccagcctggccaacatggagaaatcccgtctctactaaaaatacaaaaaaattagccagacgtggtggcaggcacctgtaatcccaactactcaggaggctgaggctggagaattgcatgaacccaggaggcggaggttgcagtgagccaagatcataccattgcactccagcctgggcgacagagcgagactccatctccaaaaaaataaaaaataaaataaataaataaataaataaaaaacagtaaattttacatgatgtatacttagccacaattaaaattaaaagttaatatttaaaagatcatttgcaggactggatgtgaaaagggaaaaaatatcctaaaccaattttttttttttttttttttttttttgaaaaggagtctcgctgtttcgcccaggccagactgcagtggtgcgatctcggctcactgcaagctccgcctctggggttcaagccattctcctgcctcagcctcccgagtagctggggctacaggcacctgcccccgcgcccagctaattttttgtatttttagtagagacggtgtttcgccgtgttagccaggatggtctcgatctcctgatctcgtgatccgcccgcctcggcctcccaaagtgctgggattacaggcatgagccactgcgcccggcccctaaacaaatttttaaataaacatacaaggttaaatgtgtgctgtgtaagaaccaccacctgttcagctgctgagcacaccatcagtcctaactcagcaaaagaacccaccctctgggaaagactaaaagcgaaccgctctttcaaaaatgcatttttacaggtggaaatctatgtttcccaagccctcctgccagtccttggcactctgacaagtgtttctcacccctggggacatggggtcatggggctggagatgcaaaagggaaagtcaccaaggctaagtttcagctgcttgcatccttgtagccagggccagagggccatgtgggggttccccagctcctaccgtccatgctggactcatggggcacggctctgccgcagtggccaggctcacctccatgaagtgattgctcagggcgggccccgagtcattcttgaaggtctggctgacacggagatgcctcttgttgctgttcttgtcccagtgcttcccgtagctcacctccagctgtgagtgcaggtggcccgagtcctcctcatgccagagctggacctgggacacacatgggtggtgaactgcccatggaggccctgcccacccagtccctgggcctcctcatagccacccactccagggatatcagcctggttttcagaagagacggttctgtagaaagcactatttttttttaatttattacttatttattttagagacaagatctcactctcccacccagactggagtacagtggcgccatctttgctcactgcaacctccgcctcctgggctgaagcgttcctggatgaacagacataagactgagactgaagttccagccccggatccattcccatatggctatgtgattgtgagcaagtccatctctttggggatgagttcagggtactcagatcaccacttgcctgactctagtgctctctccggatgtcgcacctggcctgggaacccaccttgtggctgaaggctaggatctgtgtgcagtggagctcgtggcgcagctccagcctgtaggcaccgtctgagccactgtctgcccgcagcttctggctggtgctgcactcgtgtgccgcctgctttgcctgacctgtgtggatcaacccagagacccctgccctcctctgccaggcagccctccaccagggctccaagagaaggagggcccggcccagcctggcctcagccacaccccccatgctttgctccacctgtcactccattagaacctgtcgatggggaggtgttaagagatgggtgaatgtctcctcaacagacacactttttaatgggcaggtattcagtcctactcagagccaacagaatgactaatggaaaaccccgtggtgacagcgtatctcagctcacggagccacagccctaggaaacagggcaggccctgccacctccacctgccccgcaaccaggcacgcagtgccttacccaggaggctgtactggatcctcagggagttggtccagagctggccccgttgctgcagcaggccaagggcacgaagccccaccagccctggcacaaacagctcggcacccagggcggccaccctccgtccattctcctccttcctctccagcagtgctgcagggacagagagcaggcagatgagagggtcagcccccagggaccagcacccccatccccaggcaaagaagggactcaggtatcaccgaggggccttggggttgggggctccttgaagagccaacatgtgcaccctgcacaacaggccacagacaggcctgatcacagctcactgtagccttgacctcccaggctcaatcgatcttcccaccttagcctcccgagtagctggaactacagacgtgtgccaccacacttggctaatttttgtattttttgtagaagcagggatctcactatgttgcccaggctggtcttaaactcctgggctcaagtaatcctcctgcgttagcttcccgaagtgctgggatttcaggcgtgagacactgtgcctggcccaaaaataaagtagaataaaacaaaatcgaacaggacagaagagaaaagaaagaatagcccatcatgggttgttgggtaaatttcaccttctgaagcttctgagacacagaaggtcagccagaacgcacaggtgaaactgggccagctgttatgactcccagacacccacatcggggggtccacagccactgctccaagtacccccagccccagctcctgtccttaccttggaatcttccggaacacccatgagcggcacacccaggcgccactaccccagctccagcaccagggccagcacctgctcactctgtgtgtgttttaaatgcccagtgtattttaggtcaaaatgttacaagtgtttcttatcgtgggtcagaataaaaacagtccaaaagttgctattttaaggtttgtgggtgcagttggaggttgggggaggttctgggggctcacatggagcttggatctgcccttggatgggatgttgatattaagagaagctgcagtgatgaggaccataaggaggcacttgggccaccacaccctaacctggccacagagcagaggggacagaaggggtctcatctcctacctgtcacgttggcctggtcactcagcagatggctcagcgatgcggagaaggccagcttgctgcccacctgccgtgtgaggttcccggtgaagacgacggggctgccccccgtcaccagtttcacctccagctgcgcctggaaccgctcagcctcgccacccatggctggctgcaggtcactccagccctgaaacggcctcagtgtcacctgggaggacaggcttggccagcaggcccagcccttaccacacgaactgggaccagacagggcaggagacaacatcgctaacaaccttctacaccgatccttacccaatttttctttttccttgagacagagtctcactttgtctcccaagctggagtgcagtggtggaatcctggctcgctgcaacctccacctcctgggttcaagtgattctcctgcctcagcctccctgggattacagtcacgtgccaccacacccggctaatttttttatttttagtagagatggagtttcactatgttggctaggctggtctcaaggtcctgagcacaagtgatccacccgccctggccttccaaagtgttaggattacaggcatgaactactgtgcccagcccttccccaattttttaaactctggatttctcaaaattagaaacctgtgttacaaactcagacataaatgtaagggactcctcttctctccttgacatccccctcattcagtccatcaggaacttgagtcaactgtccctatggaacgcgtctagaatcaaccacttctgccacctccgctgcctcaccagctggagccccggtcatcggcctgtctcactgcaacatcctcctggctctcccggctcccatcccgctggtggcaactaatctccacacggcaaccagacacgtcgaatgatggcacactagcctttcttacagtacaacccaaagtccttgtgaaggccagcgaggccagaactttctctgctggtcagtggtgcagacctggccatgggaagacactggcagatgggccacggggacagctcactacacactccacggccccgcaaagaagattctctggaaaagtcatgagcaactacaaatatcatctttgatggccccgccaacctgtaggctccccacccccacgcccccctgatggccaccagctggtcagtttacccaaaagacgccaaaacaagactcactattaccacactgccactacttaatgctctctgtccccgatccccacagatgtgtgtgcggatgtgtgtgtatgaatgtgtgtggatgtgtgtacagatgtatctgtacatggatgtgtgtgtatacaggggtgtgtgtatacagacgtgtatgtacacagacatgtgggtgcatacagatgtatgaatgtgtgtatacatggatgtgtctgtatgtagacatgtatggacgtgtgtgtgaacgtatgtatacggatgtgtaaagaggtgtatatatatggatgcatgtatatgaatgtatgcatacagatatgtctacacgtggattgtgtgaatatggatgtgtatggatgtgtgtgtacggacatgtgaacagatatgtatatatggatgtgtgtgtggatatatgtacagatatgtatatatatggatgtgtgtatatatgaacgtatatacagatgtgtctacatatggatgtttgtgtgtatgaatatgtgtgtatggacgtgtgtttatggacatgtatgtgtgtaaagagatgcatatatacggatgcgtgcatatgaatgtgtacagatatgtccacatgtggactgtgtgaatatggatgtatatggacgtgtgtacaccacggacatgtgaaaagatatgtatatatgtggatgtgtgtatatgaatgtgcatacagatatgcatttggatgtgtgtgaatatggatgtgtatggactctgtacagacatgtgtacagatatgtgtgtatatacgaatgtatgtacagctgtatctacatgtggatgttcgtgtatgtaaatatggacgtgtgtatgatgtgtatgtgtatggacatgtgtatgtcatatgtgtatggatgtatgtgtgtgcacacacgaatatacagacacacccttctccttccctttttacagaaacagatgctcgctctccactctgctcccagcttttcctgctggcaggcacattcgagcgatggctttctccagtctgtatcagaggctgtgcagtgctcgtcagagcttcctcaaggtgcacatgaacagggtgaacacagaatttctcacccaaaccggaacactttgcagttaaagagaacactagttgtaaatgtgtcacgtcaccaggcgtaaactggggctctccaggcaacccacgacccaacccctgcacactagcaggagggggcactgaacagaacattcttccctaaaccaaccttaaatcccattagctttgagacaagttgaacataagctctgggacttcgtattcatgagctcatctgcctcagtttcttcatcttgtattgggttacagaggacttgaaggggggacctcctgtctgctgaaacaggctccagaaagttccggagttccggctgttactgtaattgtgatgagtctggggcagacggaactagaatttctccaaaggcaaacatttccaggctgcaggcagctctatagggaccagcaggaagatccacggggaggtagaggcaatccgtgcttgcacatttagcaaacaactagaagttcaagggcccctgggaattctgaaaatgaggcataagtctcagccatcaggcaggtggagctttaggaggaagacagctctcccctgacataggtcttcccccacccaggctgacggcagagctggaagaggagaatgtatttttgcagcaagacatccagctccggcttcagatgctccactccaggcctctctgagaagacactggaaactgaggcagaatcaggagatccactgccgaaggtgcccagcaatcatgcctggtgggatcaagtctaaagctgctatttgtaccctggctggaatgcagtggcatgatctcgactcactggaacctccacctcccagattcaagcaattctcctgcctcagcctcccaagaagctgggactacaggcatgcgccaccacacccagctaatttttgtatttttaacagagacagggtttcaccatcttggccaggctggtcccaaattcctcacctcaagtgatcctcccgcctcagcctcccaacatttgtatactttttgaagtcacacatcttcctgaaaagtggatagaagttttcaaccttcttcgcaggatggagggcagacacagaacttcaacacagtgacaggggcttcaaacgactaagttccgtccaggtacccttgggtaagaaccctagaaaagcacctactgagatgaaaacgagcctagacaacatagtaagacctcgtcttcacaaaaaaaagaaaaaaagaaaaatagaagggcatggtggcacaggccgtagtcccagctacttgggaggctgaggcaagaggatcgcttgagcccaggggtttgaggctgcagtgatctacgatcactgcacagaataagaccttgtaaaagaaagagaaggcggggggtgggcagagagggaaaagagagagggggaaagagactggtagaagacatgggggaaagtgggggaaagacgtgggaagaggaaaagagagggaatagagggagggaaagacagggcgagaaaggaaagaaaaggaagaaaggaagaaaaaagaaaagagaaaaaacatataaaccttgtggcctgggaattccattgttaagaatttactctgcagagagaatggtgttcatggcagaatatttgtaagagcagaaacctggaaaaaactcaagagtccttcattattaaactagctgaataaattccattccacggactattacacagcaatttgcgctacacaggaggcacttattttctttaaagtggatatattaactccatgtgctgactgtgtgcatagatcatctcagaaaggaatcaccaaaaaatccctaacagtggttggctttcaggaggggtgggagagaggttttgagtctataccagcgccaaccaatagaactttctgcaatgaggacaatgtttcagagccacatgaagctgtggaacacctgaaatgcggcccatgcagccaaagaaccaaatctttaattttctttaattttaattcatttagattttttttttttgagatggagtctcgctctgttgcccaggctgcagtaaagtggcgtgatcttggttcactgcaacctccaccccaccaggttcaagcaattctcctgcctcagcctcccaagtagctgggattacaggagcctgccaccatacccggctactttttgtatttttggtagagacggggttttgccatgttgttcaggctggtcttgaactcctgacctcaggtgagccacctttctcggcctcccaaagtgctgggattataggcgtgagccaccgcacctggcctcactgagatttctataaacatgtgtgccactggctaccatatgggagagtcagttctataccctttcatagcttttgaactttgaatcatttaaatgtattgcctatttaattgtagaatttaataatatttagattgaattaatctcaatgaaatctacaatagaatttaaattttatcagcgcatgcttgtctgaaaagattgccaaggtgtacgtacgtatatgtgtattgtgtgtgtgtgtgtgtatgcacgcacacacacacatatatatatttttgagacgcagtcttgctctgctacccaaactggagtgcagtagtatgaaatcggctcactgcaacctctgcctcctgggttcaagtgattcttctgcctcagcctcccaagtggctgggattacaggcacgcaccactacacccagctaatttttgtatctttaatagagatgaggtttcaccatgttggccaggctggtctcaaactcctggcctcaagtgatccatcctccttggcctccccaagtgttgggattacaggcgtgagccacggcgcccagctgccaagctatatttttgagtaaaaaaaaaaaaaaaagtcctcacagagttaaaaaaaaaaacaaaaaaactgggaaactgggagtggaggctcacgcctgtaatcctagcactttgggaggccaaggtgggcagactgtgtaagcccaagagtttgagaccagcctgggcaacatagtgagaccccatttgtacaaaaatataaaaaaaagaagccaagcatggtggcacatgcctgtagtcccagctactcgggaggctgaggtgggaggatcgctggagaccaggaggtcaaggctgcagtgagccatgtttgcacctctgcactccagcctgagtgacagagcaagaccctgcctcaaaaaaagaaaataaaaataaaaaaacaaaacctaaacatgacaactgggttttcatgctattgcatgatacctgcctccctcaaaacttgttacatcatcatatcactcacctgatagacaaaataaaacccagaaacccaaactaaaaatatttgcaaatctataaggttatgggttgtactgtgtctccctgaaagatgccgaaaccctaagccgcaggacctgtgaatgtgaccttattcggaaatagggtcttcacacatgattaagctaagctgaggtgatgagggtgaaccctaatcccgtttgcctggtgtccttataaaaaggggatgtgtggacacagacacctacaaagggaagactatgggaagacagagacagaagaccacctccaagccaaggagctctgggggcttctagaatccaggagcgagacctaggtcagatcctccctgacagccttcacaggtggggaaaaaaaaaacaaaaaacaaaaaacaacaataacaacaaaaaacaccttgatttcagactcctggcctccagaactgtgagaacaaattcctatagttgaagacacacagttagcgtactttgttaaggcagctctgggaaatgaacacagatttctcagggcgtgcatcagtacttctgcaggaaatttgggacatggcatgctttaacttacaagttatacctttctctattctgaattctttttttgagagacagggtcttactttgtcacccaggctggagtgcagtggcagaagcatggctcagtgcagccttgaccttctgggctccagcaatcctcttgcctcagtctcctgagtagctgagactacaggcacacaactctgtgcctggttaacattttttaatgttttgtagacaccgggtcttgctatgttgcccaggtttatctcgaactcctaccctcaagtgatcctcccaacttggcctcccaactttctgtaattacaggtacaagccgtcatacctggctttttctttctttctttttttgagacagagtctcgctctgtcgcccaggctggaatgcagtggcatgatctcagctcactgaaacctccgcctcctgggttcaagtgattcttctgcctcagtctcccaggtagctcggattacaggcacccgccaccacacccagctaatttttgtatttttatcagaggcagggtttcaccatttggccaggctggtctcgaactcctgatttcaggtgatctgcccgcttcgacctcccaaaatgctgggattacaagtgtgagccactgcatcccacctgaattcttaaaagcatgtttttgtgttattaatatccatttttaacatcaatgacggtgggatttgagcccatttttttcttgtttatacatttctgggtaatagaactaacacttgttaactggcaggtagaaagggaagatcccagaggtggtggcaatagttaacagggctctggtacgggggaaggaaatccctggggaggtgtcaggtgcagacacaggtgggcctagggtgtggagcaaaccttgatgtagtagacgtccctgtcatccagcaccagctccaagtgacccgtgtgggcactcccaagagcctccatctttcctgggggtgcaaaacaagagtttagagacaagggttcaacatctggatctggcccctccgtccccctgggaggactgcctgccctttctttaatctctgagcctaagatgtagcacctgtaaaatggggctggatttagtgctgacctcaggaggtcacagacaaacctataagccagctcactgcaggggccctgccccgggtgtggcaccgagtgaggggcgcagtgagcagggagggacgttgacattaccgtccagctcgattttcttcttgggatggagaagcttgagccggaacttgttctggggcaagctgtagctcatgtccaccccgacgtccctcagcacttctgacccgggcgtgcccatgaagacgtgggctgtggcttcttgggggaaccagctgcccttctggaaatagcagagtcttcaagattgagagcctccacctgtacccttcagacactcacattgttgtcctcacaatcccccaaccaggaatttctcaggcttgaaaactgcctgcagaattgtaaagctctgcagaacagcccaggaccatgtccacagggtcgcaatttattcagcaaacggccagggagaagcggctgcggtgcacactcctggcaccctgcacagacccctcccatccttttttgttttgagaccgagtcccgctctgttgcccaggctggagtgtcagcggcatgatctcggctcactgcagcctctgcctcccaggttcaagtgattctcctgcctcagcctcctgagcagctgggattacaggcatgcgccaacaagcccagtttttttttgttgttgttgttatttttggtagagatggggtttcaccatgttggccaggctggtcttgaactcctgacctcaagtgatccacctgccttggcctcccaaactgctgggattacagtgagccactgcgcctggcctctcccatccttttaaccagctttgtgtccttgtcccccagcttctgcaagctctgcacttcctggctgtcacctgagggcttcagaacattgccctccagcactgcagccaaaactcccagcaccctagcccagaggggaacacactctgcgagtacctcgtgctctggggctccctgtgagaccaggctgaggctgcaacttcacctgaaattgcacatctctcagcatcttccctcggcctttcctaatttctccactctttctgggtcccccggagccttttcttaataaatcacttgtaccccagtccaaggcttcggtctcttgttggggaagtgcagcctcagccacaagtcccgttcggaaatcccatgtcaccgtacatttgttcaacaccaacagagatgtgtgctgctgcgtggaagatgactgagcatgagacacgcagtgcccgaccgcgtggagcctacgtcctagagaggaggcacaggaacaccagacacgagaacgggtaagacggcagccgccggtgagtgtgctggcgaagtcattggtgtaggggccctgaccgggatgctggtctagacagggaggcccaggaaggctgcctctgaggggtcccactgaaggacacttgaaaggagctagggagggagttaggtggatgtcccggggaagagtgttcctggcaggggaaacgcccagtgcaaaggccctggggcaggcatgtgtgtggccttgaaaaaggggccagtgtgtcttcagggcagtgagtctggaggagagtcagggaaggaggccagcaggggcaggactgccaagggcctgtgggtcacggcgtctggctcctactttaagggtaacagaagccataggggggcagtctacacagagaagggacacgatccagctgggatttcagagggcccatctggctgctggtaaagatgggaaggagaccagagcgggagctgggggatcagacaggaggccaccgagtgcctcctctggaccagatgctgatgacagaggggtaagtaaaaccaaccctgaatctgctcccaggaactgagtcaccagcggggaagacagaccttatccaagtagcttcactaagaaacagaactgattaaaagggaagaaatgtggttgtcttacggcaagtcacaaaagaatatgatgtgctctggggtaaccaaggcaggcttccctgaggaagtgacccctgaactgagacctaaagactgattcagagttaatgcatcatacagccccagatggagaatcagcatgtgcaaacgtccagaagaaacctacagcaagaccagcacagcccaacagccccagagaggagccccacgtcctttagggtgagcccagggctgacctaaggagatccacaacatggctgagaaagacggggctgttgtctagggcccacctggggctgcagggtataggcagcttccagcaggtactgtcggagccccgggtcccgtttctgcagcgtcacggccgcgaacacaggcaatgagagcaggtagggctggccaggcaccggccaggtcactccagtgcacagtcgccagccccaggtgtaggacactgcagagagaggtaagcaggcagcactggtcagtggagactcagagggctctgggcatgggtgcccgcagctgccacatcagcaaagaaacctcttctctaatttcttctgaggaaaggcaccatgtagacaggactcctgtgaggcagtggtgtgtagaccagggtttctctgcctcagcactgctgacatttgggatcagatcatcttatttgggggctgtcctgtgcattatgggatgtttcgctgaatcctggatccccatccactagatgccagtaacccctaccaacaaccaaatatttctgcacatattaccaaatgtctcctggggggtcaaaactgccccagctgagaacccctggtagactttttctttttttttttttttccagacagagtctcactttgtcacccgggctggagtacagtggcacaatctcggctcactgcaacctctgcctcccaggttcaagtgattctcctgcctcagcctcccgggtagctgggattacaggcacgtggcaccacgcctggctaatttttgtatttttagtaaagatggggttttaccatattggccaggctgatcttgaactcctgacctcaggtgatctgcctgcctcagcctcccaaagcgctgtgattacaggcgtgagctaccgtgcccagcccctggtagactttttaaaaagagtgtcaggcaatactgtgtagaacacaggctctgcagcaagaatgcctggttcaaattctagcttggccacttcccagctgtgtgaccttggacaaattacttaacctctctgggtctcaatgtttctttttcattattattattgttactactccccagactcactgtaaaggcctcagtctttctcatcttaaactgctaatgataatagttcctgcctcatggcgtagctgtgaggattaacaggtcagtaagtgttgagagcagcaccaggcctacagtaatgtctttggtagtaactcttatcccgattataaaaatatatttgttagctggatatggtcgctcacacctgtaatcccagaactgtgggaggccaaggcgggtggatcacctgaggtcaagagtacaagactagcctggccaacataggaaaagcctgtctctactaaaattaaaaaaaattagccaggcgtggtggcaggcacctgtaatctcaacgactcaggagaatcgcttaaacccgggaagcagaggttgcagagagccgagattgcgccactgcactctagcctgggtgacagagggacacgctatctcaaaataaataaataaataaataaataaaataaaaatgtacttgttgcaggaaattagaaagaaaatcagaaagctcagaaagatttctaaaatttttttctgtattgtatgttatagtttcaagtttatttacaattctaaatgcaacttaaatgcaaaaaagaaacattatcaagaagcaaaatttgtatatcttcattaaatagagccctccccaaccttactctaaaaaaaaaaaaagaaaaaaaaatttcaagatctcctattatttggcacatttatttcctgtctttttacccagttgagatcatattcagtgttgctggcttacacttggcattattattaacgaagtttctcattaaaacagctcactcataatggagttgaaaagtttgggaagccaaagcaggcggatcacccgaggtcaggagttcaagaccagcctggccaatgtggtaaaaccctgtctccactaaaaatacaaaaattagccgggcttggtggcaggtgcctgtagccccagctacttgggaggctgaggcagaagaattgcttgaacccaggagacagaggttgcagtgagccgagaccgcaccattgcactccagcctgggcaacgagagtgaaactctgtctcaaaaaaaaaaaaaagttatgcgatatgtcaataacttaccaacccaggagccagcaaacattcttcgtaaagggccagattgtttgtttgtttagttagttacctagatagctagctagagacagaatcctccttggtcaccccggcttgagtgcagtggcatgaacacagctcactgttgcctcgacctcctgggctcaagcggacttcctgtcagccttccaagtagctaggaccactggtgcacgccaccatgcccggctaatttgttaatttttatttttgtagagacaaggtctcactatgttacccaagctagtcttgaactcctggactcaaggaatcctctcacctcggcctcccgaagtgtggggattacaggcgtgagctatccgccggccagatagtcaatattttatgctttgcggtcacacagtctagcttgcaactactcagctctgctgttgtgggacaaagtggctacaggtgatatgcaaatgaagggggtgtgctgcgttcccatacaactttatttctggacactgaaatttcaatttcatgaagttttcatgatatgagatattcttcttttgactctttttagccacttaatgtaacaacctacccttacctcactggcatttataattagccattttgcctactctggaatatttgagttgcttcctattttttgttctaaataatgatgcaacgaacatctttgtgcacagagcatttttaagtgattttggtttgcttgtatagggtagaattacagaagcattatcattgactgaagtggttggtaaaggaaaataaagccgggtgcagcggctcatgcctgtaatcccattactttgagaagccaaggcaggtggatcacttgagcccaggagttcgagaccagcctggataacatggtggaaccctgtctctacaaaatacaaaaaaaaaaaaaaaattagctgggcagggtggtgagtgcctgtagtcccagctactcaggaggctgagatgggaggaccacttgagcctggggagatggaggctgcagtgagccatgattgcaccattgcactccggtctggacgacagagaccctgtctcaataataataaaagtacaatatcgggatcccaattcgctatgccaaaaggaaaaaattaagctggaagctgagtcatgcaagaagctgccttctcttgttcctaagcaggtagctacagataaaaggttaaatatttgcgcagctattctatgttcaccttatcttatgtaaagtgttgatttattgagcaagtatgaatatgtaagtgactattcccttccctgctccttttcccttgcagcttgtggattcagtcatgtgaccataccctccctctttcccctccagcccgcttttcccctttaaacaaagggagggagagcattaggacaaatacctaatgcatgcggggcttgtaacctagatgacaggttgatgggtgcagcaaaccaccatggcacatgtacacctatgtaacaaacctgcatgttctgcacatgtatcccagaacttaaagtaaaataaaaataataaataaacaaataaataaatattgaagctttcagaatcatctctgaaaaaaggcatagaccacagattgttctgtggatttgtgttcctttatttccaagcatgtccttaaccttggcaaagtagatgtctaaattgattgaaacctgtctcagatactttttggtttgcagaatatgaatacttttagggcaggagagcaactctgggatctggagctggcatttttcccttcaaccctgggatgcccaccttggtacaatgtcatggaggccctgctgcctaccttcctcaccagtacaggactggacctcagaagggccagggacatgtctgaggctcctcacgccatccctggtgatgaggtacagctgagagctgggtggggaaagaggacagtgtcagacgcatcattttcattcattcattagacaagtaacaccttgagctgccagagcttggcacaggggcaaattctaccctgagcggggccagcctttgggcagtgcacacgctggtgtggtgacactccgtgggcacagggacagatgctgaggaccacagagagtgacaagtgctgtgagaaacccacatggaggacagcatggcacagggctgtctcggggatagagcagggcctcccctagctggagtagggggagttctctgcagaggtaacttttgagcagaaatccaaaggatgagaaggagctattgttccagacagagggcacagcaggtgcaaaggccctggggtaggaacaagttggctgctttaggagcatggaaagaaggctggtgggagggggtcaggatagagggggacggtgagtgaggggcagggaacaggggcagatgcgaggagggaggagggagatgggcagagtccccatggagcaggacaagggaaagaatatgggtaggtggggcagcctggattcactccctctaaaattgcccctctccaagagtcacctccttaggggtcacagacaagcatgccccagagggactccaggaaagagctgaggggtctgaaagttctccagctctcacctctcagctgcccacggtccctgtcagacacgcccacccttcacagtcaacagacacacatgctcgtggacacacacgcactcccacaacacactcactcctcactgccacactcacggacacaccctcatgcacacagcagctcatacattctcatatgtctgatcatgtgtactcagacacaggctcatgggtgcacacactaacacacatgcatgctaatgtcacatccacacccatgcacatccccttgtgcacacgcagacgtgatcacacactcacatgcatgcatgcaagcacacacaccacacacctgctcacctgcaccctcgtgctcatggttcccttcctgccggcactgggcacccacctgaagctgagcagctccacggcctcctcaggcgtgttcagatgcaccttaaggacccggcccttctgcacctggatcccgccatccaggctggcggcgctgcggacgctggtcacccacctcagcccggcctgccccaggatgcccgctgtgcccatctgagctgagatctggagcagggcactgagggacaggcatgtaccagctgcatcccgagggccctggggccacagatcccacctgcgacccccagcagccccctgcagtcctgagccacagcagcccctccaccactgccaccactgccacccacaggctgtacatgcgccaagcactttccagtcctcacctgcactaatcccttttatggatggggaaactgaggctcagagaggtgaaagcacctgcctgggttccatgactgggacaaagcatgtggctgggacatgtgaatcccgggtgtctaagtcccagcccaggctcttcacgccagagagcacccagcctagggcatctgcattccccatgtcaaactcagggcccaaggacagctcagctgaggggctggggacagatgctcagcagcaccatgacaggttccagaatcggaccaaatattgcacaccttctgctctggcgccatgtggccccaggctgtcagtgtcctcgccttgaaccttggtttcctcatctgtcagtgggaataagaagcaccaggcttggttggtcgggagggcgtcacacgagttcagtgagctcaaggctacctcctctcctcccttctgggtggggtggatggaagggcatagggttgtggccagccacctcgtactgcggtgtgaccttgaacatgtgactggacctctctgagcctcattcttcccacctgtaaagtggatctaaccacccagcatctctgcacacagtctcttggcacaggtgttctgcagaatagggatcctctcttacccatacggatgtcacccaggcctctgcagccctctgtagggatgggatcccaccacctaacctgcgccagctcccaggagctagatacctgggcttgacataaccattcacagagaaatccgagcgctgctggaagtcagtggttcctcggacccggatgctgatggcagccgaggcatttagggtcagccgggcaggaaggccagacacggtgggaaagaccagttcctgtgcggccaggctcagcctccggttcatctgcacctcctgcccctgcagccaagaaatgataagcgggggccgggctcggtggctcacgcctgtaatcccagcactttgggaggccgagacgggtggatcatttgagcccaagagtttgagaccagcctggccaacattgggaaaccctgtactaaaaatacaaagctgggactacagacgcctgccaccatgcctggctaatttttgtgttttcagtagagacagggtttcgccatgttggccaggctggtctcaaactcctgatctcaggtgatccacccgccccagcctcccaaagtgctgggattacaggcgtgagccacttcgccgaaccagatattttgttattttttatttaatatcccatttcacagatgcagaaactaaggccgtggtaagtgaatcaacagcttcgaggaggtaaacggaagagctgggattggaccttgggcagcctgactccaaatttcatgcccttaagtgctttgccaagtgtcacagggcagatggcatgggcaggggcagggaggagctaccttcatgagcttgatggcgagctcggccaagttaaggggccagtggttcacgtgactccccgtggccccgcagttcacaaagctcagctcctgccccagcaacttcacgctcagctcgcatcgcagagcctgccgggccccacgcctccgggtcacctgggggagagcccagacaggtcacaaagaacacagtcagggttagcagagtgatatggtttggctgtgtccccacccaaatctcatctcatagctcccataattcccacatgctgtgggaaggaccctatgggagatgactgaatcatgggggcgggtccttcccgtgctgttcgcgtgatagtgaatggggctcaggagattctatggttttaaaaatgggggtttctctgcacaagctctttctttgtctgctgtcatccatgtaagacgtgacttcctctccttgccttccaccatgattttgaagcctccccagtcagttggaactgtaaatctattaaatttctttctttggtaaattgcccagtccctggtatatcttcatcagaagcaagaaaacgaactaatacacagggcaaagtgcctgtactttgggagggggaaggggtggctgaagagaaaggtcaagaacttgtgggatccagatgaggcgtgcaaaactcctagagcatgaaccaaatcccaaccccagatgtgttttctctgacttgcacagtagtgcccaatgctgagagactgtgtgtatgttttcatgaaggttttattttaggataattttagatttacggaaaagttgaaaactggcttggaaaggtagctcatgcctctagtcccagcactagggaggccgagaaaagaggatcgcttgaggccaggagtttaagaccaacctggacagcatatcgagaccctatctctacaaaattaaaaaattaaaaaaaaaaaaagccgggtatggtggcacccgcctgtagttccagctacttgggaagctgaggtgggaggatcgcttgagcccaggagttcaaggctgtagcgagctatgatcatgccactatactccagcctggacaacagacagagcaagaccctgtctctgaaaaaagcagaaaagaaaaaaagaaaatttgcaaagacagtacagagagttcccacgtatccttcaactgatttccccattgttaacatcttccatcaccaggatgcatggtgcaaactaacaaaccaacactggtatgtttctatcaactaaactccagaggtcatttacatttcaccagtttttccatttctgtcctctttccgtcccgagatccaatcaagcaaaccccactgcgtctcgttgctgtatccccctggtctctggttcatggcagttttttagtctttgattgtttttcatgccacgtatgttttttataaattgaatttggaaattgggagatttgatataaaacccagctctccggctgctctataaagagaaacattgggctgcccaccctccccacaacaaggggcaacaaggaaccagagctgagcagtggctgccactttagctgggccatgggcttcctctgtccgccacagtccccaccactccctattgtctctccaacactgaggccaagtatctgctgccattcatcactgcactgatgcagaatgtttctcaggatgtgagtctctaggaaaagtgagaaaataacagacaaaggggattgtgcattctaagaaaaactgtttatatctagcggacctccctctttcaagtctcttgctgcccccagctctagtccaagatgcttttaacagcaaggattattgccctgctcatcctggtgttcccaagccccgggttcacccttggtggttaggaaacatgtgaccaagcgaaccaatgccccaaccgtctaccttggtcactatcagatgtacatggcaatgacattttataagagcaaaatgttgtcaataatctaaaactccaacaatgggaaaatggttatgtaaactgtggttcctacccataggatgaatattaaaatacctgcgaatggtgagcttctagtaagaaaatactcaagtgacaataagaagagaaaaagtaggctaaagatatatacaccctaagactaagcaatttcactcctaggtgtacgcccgacaggtataaatacacacgttccctaagaaagcaggcccaagagtcttcatagcactgtatgtaacagccagcaactgatggatacagaaattgttgtttgttcacacaatggaatactatgcagctatgaaaaggaacaaattataagtacacaccacaggacagagaaatctcaccaattttaaaccaaagtcagacacaaaaagaagtacaggagcagcactattcagtctccaaaaggcagcaacaacccaaatgtccatcagtgaatgaatggataaacacacgtggtacatccatacgatgaaatatgacttgaccttagttaggaatggagtactgagctacgctacaatgtgggtgaacttccaaaacactaggctaagaggaagaagccagacacaaaggtcacatattatatggttccatttacatgaaatatccagaagaggtaaatccatagagacaggaagcaaattggtggctgttggaggctaggaggaggggctgctggggagtgactctttcacgggtgcagtgtctcttttgggggtgataaaaatgttctggaacgagacagaagtggtggtggcacaacatggtgaatgtactaaataccatggaattgttcacttttttttttgagacgaagtctcactcttgccgcccaagctagagtgcagtggtgcaatcttggttcactgcaacctctgcctcttgggttaaagcgattctcctgcctcagtctcttgattaggtgggattataaacgcctgccaccacacctggctaatttttgtattttcagtagagacggggtttcaccatgatggccaggctggtctcgaactcctcatctcaggcaatctgcccacctcagcctcccaaagtgctgggattgcaggcataagccaccgcgcccagccctattttattttttatttttatttttttgagacggagtcttgctctgtcactcaggctggagtgcagtggtgctatcttggctctcggcaacccctgcctcccggttttaagtgattctcctgcctcagcctccagaatatctggtattacaggtgcacaccaccatgcccagcaaattgttttgtgtctttagtagagacagggtatcactatgttgacccggctggtcttgaactcttgagctcaagttatccacctaccttggcctcccaaagtgctgggattacagacatgagccaccatgcccggccaattgctcacgttaaaatggttatttttacatatgagaatttcatctcttaaaaaaaagagtatgcggtgaatgattccatttatataaagtttacaaaaggaactggatgtgacttctactgccaaccaaataggagtaatgaagactgggtttaacctcccacgtggagcagctggtaacccagatgacacaggctcaacaatggttcccaagacacagacatcaggcaatccaagacgatgaaccccaagagatgtaaacaagcaagatgagctcaacttcctgcctggagacagtgtccaggctgtggtgcaaggagggggaatggaggctgagccaggggactccctgaactgaggagctgggggtatggggagtccctggcagctggactttgcaggacaggataccagagatgagagagctgaacagagagcatgctcgcaggtctgcagaaggtcctacgagaatctctgtaacatcccatcaggcaaaaatttctgagatgtaacagtcaaagctctatcagccaaagaaactaataaacttgacttcatgaaaattaagacttcctgctattttttggaagacaccattgagagaacaaaaagatacaccacagactgggagaaaatatttctgagttacatatctgatgaagaacttgtttctggtcagccatggtgggtcacacctgtaatcccagcactttgggaggctgaggcaggaggatcgcttgaggtcaggacttcaagatcagcctgggcaacacagtgagaccccatctcaacaaaaagagaaaaaaacttagccaggtgtggcagtactgcctatagtcccagctactcaagtggctgaggctggaagatcacttgagcccagcaggtcaaggttgcagtgagctatgatcacaccactgcactccagcctgcatgacagaaccagacctcaactcaaaaaaaaaaaaaaggaaaaagaaaaaatcaacaacttgtttctggagtatagaaagaattctcaaaactcagtaataagaaaacaagccaacaaaataagatgagcaaaagatttgaatgtacatttcaccaaagaagacgtacaatagcaaatgagcacatgaaaagattatcaatgtcattagtcattagggaaatgcaaattaaagccacgagataccacaacgcattattagaatggctaaaattaaaaagtctaaccatatcgagtgttggtgaggatgtggagaaactgaaactctcacacaatgctggtgggaatgcaaaaatagtacaaccacttgggagaatggtttagcagctttagaaaaatttaaacatatacctaccatatgatctagccacacctactaattattcaagagaaacaaaagcatatgcctaaaaacttgtacacaaatattcatagcagctttctttttaatagccaaaccctggaaacagctcgaatgtcaatcaacaggtgaatggagaaacaaactgtggtatatctatacaatggaataccattaagcaataaaaagaaagaaactatgttataacctatagcatgggtgagtctcagaataattatgctgaataaaagaagccaaacaaaaaagagtacatgctttttttaaaaaggacatgttggcaagcgcagtggctcacacttgtaatcccagcactttgagaggccaaggcaggaggattacttgagcccaggaggttgataccagcctgggcaacataatgagaccctgtctgtacaacttttaaaaaaaaaaaaaaaactagataggcatgatggcacatgcctatagtcccagctactccggaagctgaggtggaaggattgtttgagcctggggggcaaaggttgcaatgagccaagatcatgccactgcactccagcttgggtgacagagtgagactgtctcaaaaaaaaggacatgctgtgtgatctaatttacataatattctagaatatgcaaagaagtctatggtgacagaaagcctctcactagtttctggggacagaggagaagcaggaggaagggactttttttttttttttttttttttttttttttgagacagactctcgctctgtcgcccaggctggagtgcagtggcgtgatttcggctcactgcaagctccgcctcccgagttcacaccattctcctgcctcagcctcccaagcacctgggactacaggcacccaccaccacgcctggctaattttttgtattcttagtagagacagggtttcaccatgtaagccaggatggtcttgatctcctgacctcgtgatccgcctgcctcggcctcccaaagtgctgggattacaggcgtgagccactacgcccggccgcaggaagagattattaaggatctggaagagacttttgggagtgatgggtatgttcataagctttatcatggtgatgatctcatgagtgtgtacatgggtcagaatgtatcaaactgtacaccttaaccatgtactagtgttcaccgtgtgtcaattagacctcaataaatctcacttttaaaaagtagaacaaactgatgctgccagaagtcagaagagtggttactcctggttaaggatgggtattaacaagaacaggagtacaaaggggagggtgggagctgaagatggtctgggtgctggtgacatgggtgtattgaggtggtggacaggcaggctgtacacttacaacttagggacttttccatgcataggatctatttcaagcaacagtttttccaaataaagccagctaccagtggactactcagatttgaaccagccacttaattctgcaaggaggaggcagagtcagagttcacggacacccaagtctcaggttcaaaagtccacgcatgaagcggggtgggcctgcctgggggagtacagtgggtgtggccacctcccttaccttctgctgtaggtatctcatccttctgtctctgtctcctggacactcggggctggctggctgtggtgcaggccctggttctggccctgggggttcctctggctcaggctctctcccgtcttcctgaccccagaatgacttcctgccaaacagcctgtgagcaatttcctcagcattttccagccggagcccaagctgggaagggaagccacaggctcagggaggaacaattcagtcacaggggtgatgatgagctgttaggctggggatatgaatggaggacccagaaggcttgagcacggcactccaggctccctggtgcccacctgggctgaggttcggggacacaaccttgggaaatccaccaatctctctgtatctacttggtagatgccacacggtaagaattcttgccaattctttaaggcttggttcaaatgtcatcacctgtgggaagccctccctgaactcccatgtcactctcttcccacctcctctgccccacacacaatatactcagactggaatgtgtgtcttcctcgaaagatccaggatgagggcaagggctcgtgtatcaatcactaggcacctgcacgacctcccctggatgggggggagggtttcaaaatttgataggtgaataaatggatctttccttctgtccctcccgtcttccatctgcccgtccgcgcacccctctcttcacctatcctttcatccttcccacgcatccatccatccatctgcctctccaccttccatcttttctttcctttgttctatccatccttattcctatccatccatctgcttttcctttcttatggacccctctccttctatctattctttcttccctttttccatccagacatctctgatagcattttcagagaagtcaccagagaccagcccttggcaatgactggtgagtggatggatggataatagatggatgtgtgactcagaggatgaaagatggatgagtgggaaaacagatgaatagataggtaggtagacagagatggatgggaaattacagggctggatggacacacagatggacagatgggagggtgggtatgtccatgtatgggtaggagggtggacagatgaataagtgaatggatggatgggtgggtgggtggtttggtaaatggattgagtgaatagatggatggatgtatggatggatggatgtatggatggatggacggatagatggatgaatgatacatgggtagacagatgatgggtgggtagacgaatgaatgatggctggatagatgatgggagggtgggcggataaatgatgggtgggtggatgaatggatgatgggtgggtgggtgtgtggtttggtaaatggattgagtgaatagatggatggatggagggatggatggatggatggatggatgaatggtacatgggtagacagatgatgggtgggtagatgaatgaatgatggctggatagatgaatgaatgatggctgggtgggtgtgtggtttggtaaatggattgagtgaatagatggatggatggatggatggatggatggatggatgaatggtacatgggtagacagatgatgggtgggtagatgaatgaatgatggctggatagatgaatgaatgatggctggatagatgatgggagggtgggtggatagatgatgggtgggtggatgaatggatgatggatgggtggatgggtgggtgggtggttagatgaatggatgatgggtgggtgggtggtgggtgggttggatgaatggatgatgggtgggtaggtggatgggtggatgaatggatgatgggtgggtggtaggatgaatagatgatgggtgggtggatgaatggataatgggtgggtgggtggatggatgaatggataatgggtgggtgggtgggtggttggatgaatggatgatgggcgggcgggtgggtggttggatgaacggatgatgggcgggtgggtggatgaatggatgatgggtgggggggtggggggctggatgaatgaatcatgggtgggtggtaggatgaatggatgatgggtgggtggatcaatggataatgggtgggtgggtgggtggatggacgagatgaatgagagggatgtgcgtggatggacggatggacagatgagcaggtcagtggatagatggaaggagggagggagggatggagtgatggaggcatgtaggtgaattgatagatgtatggacatatctatgggcaggtgggtgactagatattaggggaggagattgaacaatggaggcaagggatggatggacagacaggtaagtgactgggatattttttggcccaagtctaggagaggccctgcagaggctatagcaaggctcccctctaacctccagaaggttgaaggcacggcccatggtgtggatggtcaggttgactgtggcagaacggggaagaaaggaggcaggagagaagagaagggtcccctccaggttggctcccaggctgccagacactaggagtaagacaagaacatcagtacactctgtacactcacagagtggggtctggctattaccacagggccataccctgagacagggccagatacatggtgtgtcttcccacccctccctggccaggatgggaaacagcctttaagccttttcaagaacagagggagtccaggacacagagtcacacacacccacttctgctgacaggcagagaggaggtgcccagagcacccgacccccaaccccaggcttcccagaatggctgaggtagttttggagccttaggttgaaagagattcccttttttattttctgtttaattacaacaaagaggcagtctcagtgtggggctaatctcttttcttaacacaggaaaaaacacttctcacaattcacagccctcagcaagccacagaatccaggagaatttaataaaacagtgtttccgccaggcacagtggctcatgcctgtaatctcagctttgggaggccgaggtaggcaaatcacttaaggccaggggttcgagaggagcctggccagcatggtgaaaccccatctccactaataaaaatacaaaaattagccgggcatggtggtgcgcgcctgtagtcccagctactcgggaggctgaggtagaagaatcacttgaaccctggaggcagaggttgcagtgagacaagattgtgccactgtactccagcctgggcaatagggcgatagtccatgtcaaaaaaaaaaaaaaatcagtgtttcgttacccgcctcttggtgtacagtactcctttttaggactaccttctctttacagagagttaaggtgattttctattaatggtagtgatagacaatttcctctttaacaaaaatataaggtacaaacagccaatttagagaaaagatgtaagtattcagctgaatgccataaaataactgatatgacttctgtcttccaaaaaaagcagcaggtgctatgaaaatattccaaaaatatttttgaacaagcagcatgtaagttttttgttgttgttgtttgtttgttttgttttttttgagacagggtttactctgtcacccacgctggagtgcagtggtgcaatcatgactcactgcagacttgacctcctgggctcaagcaatcctcctgcctcagcctcccaaagtgctgggattacaggtttcagccaccacacccaactgacatgtaaatatttgaccccttgacacaacgtctgatccacatgctctcaagagctggagctccagggtcccccagcctttgtggttccagagcaggacaggggctgcccaggatggccatacctgatcggaaggtgacatcagaataggacgagtgtttccacatttctgggtggaactcctggctgaggatgtcctcggggagggtgtcccggagggcccgtttcagggggtcgtgcgtctccagcagctgcaggatgtgactccacacaaaagaacccactggaatagagtcgtgggcagcagggaggggccgtgaggaaagggccaggagctggcgctgtccagagaaaagaccctcccgacccccatcccagtcctgcaattcccacgcacgggggcttctcaggagtctggctacagagacctacgtcttctctcaaacagcagccaacaagtcgtgcctgaacagaacttggaaatccagcccgtgtatggaattctgacacacttcccagaagagaaaggaaggtgtcatggactcaaaagtcagacctgagtctgaatccagtcccaaagctcaaaacctgtgtgaccttggggtggtccctctgcctctccgagcctcagtttcctcatcagtgaaaatgagaagtcagacctgatttcaaatcctagttccaccatgtaccactgtggcctgagatggtcactccagctcttggaaccttagttttctcatctgaagaaggaactaacaaagtatcttgcagggctttttgggaagatcagttaaaagcagagcctggacctaaaaagactaagcacatttcagcatcaacaaaaggtgacatgtgacccatgaaggtccctggagggataaagatcaaataagagcctcaggggactgaatccaacgggaatattagagtcctacagggagcccccaaccctccccccattgtctcaggctcttagaaggtccagtcaggggcttctggaacaatctatcacagaatagagcagaatgtgggtttttagggataaggtgcccacttattcccactggacaatatatcaggtggtaccccagggccactgtggaggctgagcccctcagctgatcccctgaggaggggtttagcacacatcacaccccatgcctgaaactgccaaggcagagaggtgtatcttccaatagtgccatctcttcagaatgtaattcagcaacgtcacatcagacttttaaatgtacacaccctttaccatggcaacttatcttctgggaaattatcctaaagtgagattaactcaagggccaaaggtagctgtgcaggtaggtttgtggttgttgcttctaacggcaaaagaccagaaacagcctaaaggcctatcagtggagacgggtaaaatgggttatagtacaaacttctggcggaacacccacacagccacagatcagagtccacaagagctatagatgagagacaagctcctagacatgctaaagacaaaaagcaagcagcaggctggacccagtggctcatccctgtcatctcaagcactttgggaggctgaggtggatggatcacctgaggtcaggagttcgagaccagcctggcccacatggcaaaaccatctctactaaaagaatacaaaaattagccgggcatggtggtgtgcagctgtaatcccagctactcaagaggctgagtcaggggaattgcctgaacccagaaggcagaggttgcagtgagccacaactgtgccattgcactccagcctgggcaacagagtgagactctgtctcgaaaaaaaaaaaaaaaaaaaaagtccgggcgcagtggctcacacctgtaatcccagcactttgggaggctgaggcgggcagatcatgaggtcaggagattgagacaatcctggctaatgtggtgaaaccccgtctctactaaaagaatacaaaaaattagctgggcgaggtggtggccacctgtagtcctagctacttgggaggctgaggaaggagaatggcatgaacccgggaggcagagcttgcagtgagccaagatcacaccactgcactccaggctgggtgacagagcgagactccgtctcaaaaaacaaaacaaaacaaaaaagccaagagcacaacagcaagtagaacatgatcctgagaggctattgttaaggagatacgtgtgtatgtttacctatgtattacaagttctgatgtaatacacaggagaactgttcacagtgtgtatcttcaggacataggaaaatactggggggaagaggaaggaagactaattttccatttgtcccttgcctatgctttaaaattttgactatacagctacactgcattaataataatagcagtagtgataacaacattaaaagcaacagtcacacatatggcacttactatgctttctaaatgtctttgtgtattaactcattttatgctcacaacactctatgagggaggtactagcattatccctattttacaggtacagaaatggaggctcacaaaggtttacttacttgtctaaaggcatacaggaaggaagaggtgaagctgggatttgaacctgggttctcaggctccaggctctcaccccactgtgcattatggaaaatttttcaacaatcagttgaacttatttttttgaatttacatctttgcgttcaggtgcctgtataaagggaattgtctcactccagaagggatctagatttgccgacgccatccctcttctatcttaggtctctctttaggatactgtgtcgtgatctggccagagctaaaagaggcctcactgattcccatcctattttacagatgaggaaactgaggaccagagaggagaagcaacttctccaaagtcatccaatggcagaatggggactggaattgccatgtgggggaggggagaatacatagccccttatctagacagtgtggtagagaaacaggggaacaagaacacagcagaataccaaaggggtggagggagaggatgctctcaaatcccctgcactcttcaggaggtgccctcccagccccacccctgcccacacccctcccacacacacacccatggctcaccctgggtggagagctcgcctgcctgggtgcgccgcacctgggcaaacacctcctcactggggcatctcatcagggccaggtaggcattgatacggatctcagcatcctcctccagggattggtatagacgggagagcaccgatctctggcttgggcagaaggaaagccatcacccaaggcctacctacctccacccaggagtatgatgtccctggctgcagcaggtggacctgctgcctagccccagctgtcctgatgcccctactgcgggaggcttccccgacacacactcacctgtggcgcagctgtgggaggtagcaggggttcactgaccttgcctaattcccagtctctaccagccccagcctagagcctcatcaattccccaacaaatgggcatggctacgttccaataaaactatttacgaaaacagcatagtgtctcgccacacaggaggcctttaaatgtcttggccttcctaggcaattcctaagcaattcacctccccacattgtgactccctcaatacctattggcttcctccacagccagccagccagccagccacccacccacccacccatctatccattcacccatccacccacccatcatccatccacccacccatccatccatgcaacaaatattaacataagcaacaactatgcactcagcactgtgctaggtgacagccataaacaagaccaactcagcccctgtccacctgaagctggtatcctagtgcagggagacagtcaatgagattagcatgtgaaatacataaaaagttaggtggtggccgggcgcggtggctcatgcctgtaatcacagcacttttgggaagccgagctgggaggatcatgaggtcaggagatcgagaccatcctggctaacacggtgaaaccccatctctactaaaattacaaaaaaattagccgggcgtggtggcgggcacctgtagtcccacctactcaggaggctgaggcaggagaatggcgtgaacccaggaggcagagcttgcagtgagcggagatggtgacaccgcactccagcctgggtgacagagtgagactccgtctcaaaaaaaaaaaaagttaggtggtaataaaccctaaggaagggaaaatgaaatggggaaacaggaccagagccagggggacctgggaggttcaatttcaggtgaaattgtcaagggagacctcacagtgaaagtgccttttaagctaagacgtacaggatgtgaaaaagaaaggcctggggacatctggaggaaaagtgtaccaggaaagagcatgtgcaaagggcctggggcaagagagggtcacaagtgtttgaggaagaacagaaagggcaatgtgctggggaggagggatgggaggtgacaggagcaggtgaggcccagaggtcagatccctcagggcctgggaagtcaatgaagggactgtaactttgactctgagtaagaagggaggtagtggtccagggattagcaaactttttctgtaaagggacagagaactcttttagactctgcaggccatgcggtctcttgcaatgacttgactctgcaggtggagcaggaaagcagccatagataacacctaagtgagtgggcatgcctgtgttccgataaaactttattgagaaaaacagaccaagggccaggtagtggcccatggcccgtagtctgccaaaccctgtactagagggggcacagatggcactggtaatcatatggttgtgtttttgataaataatctgcttcccacactacacacaggcttagacctggatacctgttcacactagtacccagcccacagtaggtgctcattaaatacatgatgaatgaacaactgaataagtgaattagcaaactgtggttcgagacccaccaccacccaaccccaaccccatgaaacagcacacaagggctcacgtctgcagagcaggggacccttcggaaggcctggatggcccccagccggatctcgggtgtgctgcttctcagagatgcacaggcactcaacgtaggggtgagagccatggctgccaagcccgcgttgccgactgccttcagcacaagctggagctaaatcgagatggaggtaggaccatgaggggcagtggcgtggggggcggggcagtggcgtggggggcggggcagtggcgtggggggcggggcagtggcgtggggggcggggcagtggcgtggggggcggggcagtggcgtggggggcggggcagtggcgtggggggcggggcagtggcgtggggggcggggcagtggcgtggggggcggggcagtggcgtggggggcggggcagtggcgtggggggcggggcagtggcgtggggggcggggcagtggcgtgaggggcggggcagtggcgtggggaggggcagtggcgtgggggagggggcagtggcgtggggggaggcagtggcctgggcgggggcagtggcatgggataggcagtggtgtggggggtgggctgtgaagggcatttacccaccttctcggggtaggggccaatttctgtccccagccacgctccagaccccgcgggccagcctggcgccttcctgggcatctcagcccattcccccttccccccttcaccccacccccactcagtggtgttggggggcagtggtgtggggggggcagtggtatagaaggggcagtggcgtgggggggcaggcaggagggtgaggagacgggttgaagtggggaagggggaatgagggataggaggaaggggcaaaggggggaacccacccccaccctctccacctggagcttgcctgattcgcttcggccccactgggggcactgaagccggtactcaggacactggatgtcctcaccttgtcatcatccgagggctcctggatggtacagttctcacccaaggcgtctcccaggatcctcactagggagccgactccaggcagctggccgcagggcccgtccagagaagcacagaggttgtgcaccagggctgagatgcccaggaaggcgccagggctggccctcggggtctggagcagtggctggggacagaaatcggcccccacccgaggtggtgggtaaatgcacttcacaggcctcaccctggccacacaccgactcacctgggcaacttcataatacagagctgagtcccccagagtctgaacaaattgctcttttcagggaacattttaaaagcaccccagaggccagacacggtggctcatgcctgtaatcccagcactttgggaggccaaggcaggtggatcacctgaggtcaggagttcgagaccagcctggccaacatggcaaaaccccgtctctactaaaaacacaaaaattagccgagcatggtggtgtgtgcctgtaatcccaactactcgggaggctaaggcacaagaatcccttgaacccgggaagcagaggctgcagtgagctgagattgtaccactgcactgcaccctgggtggcagagcgaaactctgtctccaaaaaaaaaaaaaaaaaagaaaacaaaacaaaaaaggcactccatgtggcccacgactcagacgcccagctaccctcactccagggcttcagtgaaaggaaggcaaacaggagggggttcaggacacagctgctccctgccccaggcacctcagagaaatcagaccaacaaatctttttttttttttttaagatggagtcttgctctctcattcatcctggagtgcagtggccctatctaggcccactgcaacctccacctcctgggttcatgtgattcccctgcctcagcctcccacgtagctgagattacagacacgtgccaccacccttggctcatttttctatttttagtaaagccgggtttcaccatgttggccaggctggtggtgaacccctgacctcaagtgatctgcccgcctcggtctcccaaagtgctgggattacaggcatgagccaccgtgcctagtctagaccaacaaatcttagtaaacaaactgtgttcactacaagccagactgctgataacatgtcacacacgttgcctttcttatcattcccattttgcagagcaggaagctgagacacaggaagctgagacacagaaagggtaagggacgtgcctcaggtagcccacagctatagatagaactgagacttaacccaggagaggctggctcccaggccaggcatgataccaacactcacggcttctcaaaatgcaaattctgggctcactctaaaatccagccctggggccctggctgtgaacaggggcctctgtgctagacccacgtcactccagaacagggactgcttggcagctgtggagaaataaaatctctgcctagctctgtcctttttttttttttctcgagatggagtcttgctcttgtcacccaggctggagtccagtggcacaatctcagctcactgcaacctctgcctcctgagatcaagtgattctcctgcctcatcttcctgagtagctgggattacagatgtctgccaccacgcctggctaatttttgtatttttagtagagatggggtttcaccatattggccaggctggtctcgaactcctgacctcaggtgatctgcccacctcagcctcccaaagtgctgggattacaggagtgagccaccacgcccgagctgcccagctctgttctttctctggattcgtgactcttcaccagatctgtgttactacgctagggtgtgagcacactgtgtgaaggtgtgaacataagcatctgtgtgtgtgcatattggtgtgtgctgtagaatcctagtgcttgtgggtgtgtacgttcccacttgggtgtgcaggtgtctcagcgcactcgagtaccctagtatgcgtgtatttcctggtggatgcctgtgcacacgtgtccccatgtgggcatctcgtgtgtcccattggatgtgtgcatgtgcccatgcgtccaggtgcgtgtgtgtgtactgtgtgtcccttgtgtgcccacgcacagcccagtgtgtcttggtgtgcctatgcatgtgtccaggtgtgggtggctgtctccacacgtcccactgggtgagtgtcctactgtgtgtatgtgcatgtcctgccatgtcttcacatgtgcatacactggggtgtatatctgcatctccaggtacgtgagtcttggcgtgtatgcctcaatgtgtgtgtgtgtgtgtgtgtgtgtgtgtgtgtgtgtgtgtgtgtcttgacaggtctatggtgtgggtgtgtgtccgtgcatttccccatgtgggtgtcctgggaaagcctgcctcagtgtgagcctgcaacagtgtgtgtaggtctgtgtgtgtacacgtgatccagcatgtgtgtgcatatccctgtgtgtttgtgtgtccctgtgccttggtgtgagcctgtgtcagtgtacgtgcaggtctgtgcatgtacacatgatccagtgtgcgtgtgcacgtcccagtgcaatgggtgcctgcttcagtgtgtgtgggttgtgtcccatgtgtgtacacgtgcgctcaggatgcatgcgtgtgggtcttggcgtgtgcatctcactgcatattttctttgtgaaaggacaggggtgtgtggagcctggaaaaagcacattcaatgtttccctatatttgagcaaagaaaacaaagctgtctgttttcttaatacagagcagggcaagcgggcttggctgggagggcaggggttataaaaagactaagaagctctccggcacatgggaggggccgcctgctggaggttcccgcctctgactgctttgcccaagaaaggcggcgggggcacagacagggcaggctcgggcctgtcccagaccaaagctggagccagaagcctggtcacagcctgcagggctgtggggcaggctggtgccacttggctggcagagagcccagatctgtgagccacttccggtggccctgccaggacaactgggccagcatgaggcctgggtgctgagcagtccacacagtaatgacccagttggttctgtgtatggctgcccgggggatgaacccagaagggccagccttccctgttttcacaaaaaccagaaaccacatcgcaaagagaagaacaaacaattttgaaagggaaataaatttaaaaaaaaaatgggaggagaagaaaacaatcttaatgcaaaaatctctaacgaaggcttacttacacttcagttagaagtctgtttaaaatactcactttttcatttttaaagatggaaaaataaaattaccctcaaacctgtgacccttattaagctgatttcacttttccaacatgattctaaagctcagtcatcatgctcaaaccaaccctccctgaaaagctaagaaaacagaactgggagaagacaagccaggaagcactgggacctgggggagatcaaacaccagctacaaagcatcaagaagccacacttcaccaacatgaagaacttttgttcattgaaagacaccattaagaaggccgggcgcagtgactcatgcctgtaatcccagcactttgggaggccgaagcaggcaaatcacatgagctcaggagttcgagataagcctggccaacatggtgaaatcccatttctactaaaaatacaaaaaaattagccgggcctggtggtgtgcatcataatcccagctactcaggaggctgaggcacgagaatcacttgaacccgggaggtggaggttgcagtgagccgagattgcgccactgcactccagcctgggcaacagagcgagactccgtctcaaaaaataataatgattaaataattaaataaataaataaaattaatccgaaattaaaagttcattaaaatactctctccctgcttgcccctcactccccacttcccacccccctcctctccccaggcttcacgaacccggtgcattcccagaacctgccagggctcatgcagggccttgctgactcgatgacagaacaagaaaatacagcccagagaggcatgagctctggcctgcacatggaacatcacatgtgaggcaggtagaggaagcttctgggctccacaagccgatcgatgccacctgcttggctcagtgctgtgtcccagactaatggcaacagccacttccctccgcacacaccatacaattcacctggtctgcaaggtcattctacaaaatagtcccattgtccagacggggaaaattgaggcctgggaaagtaaagtaccttgcccaaggtcctgctggtgaggaatggggctgggatctgaaatgaggaagtccagatgggtttgtgctcttagttactgcacatgaatcgaacatatgtacaaataaacgagtgaaaggaggaagggggggaggggggaagggaggaagaggggagggggaagggagaaagggggcaaagagaggaaggggggaagggaggcagaggggaggggggaagggaggcagaggggaggggggagggaggcagaggggaggggggaagggaggcagaggggaggggggaagggaggcagaggggaggggggaagggaggcagaggggaggggggaagggaggcagaggggaggggggaagggaggcagaggggaggggggaagggagggagaggggagagggggaagggaggcagaggggaatgggggaaggggaaggagacagacatttccagggagatgggctaagcccagggcaggtcttgggtggttctggcattcctggtggccagcgtgccacctgctaggctgtgaactgtgggtgatgcctcttgggacccaatctgggcctggctctgagtcagtgcctgattcttgtctgctgagcagagccaacaacacagtctacctggaacagccccacctcaaaccctgcggtcaggggccagaaggcaagggctccctatattccacctggagggacagccagggctggaccagctccaggggctctcagatcctggtagggtccattctaccaatgcaggggtctctgatgcccccagggaccccagctgcctggcaccagctgtgtcttcactcccgctccctaccgatgccatctgacttggcactcactattagccgggacaagatggggagtgacaggtgacacccccttgcccaggaaagtgaggacacaccccaaggtctcaggtcagaattgaggtgaagggcagagcagctgcaatcccttgggcaagctgccctacctctttgggcctcggttttctcacctgcaaaatggggttgatgagagcacctacttcatagagacacctcaagggttaaatgagacctccacatatcgtagaaattattgacctcatctcacacagatttcctaatctccagactcattaaatatgtgtgtttataaatataatagctctgatttcaagtgctcagatttagtgccagacaccaggagaaccacttcacacacagcatttcattcctcactataagaccaggatagaggtaccactgccatcctccttatagagaccagaaaacagtcgggcgtggtggctcacacctgtaatcccagcactgtgggaggctgaggtgggtggatcacttgaggtcaggagttcgagaccagcctggccaacatggcgaaaccccgtctctactgaaaaaaatacaaaacttagccaggtggggtggtgcattcatgtagtcccagctacttgggaggctgaggcagaagaattgcttgaacccaggaggtggaggttgcagtgagctgagatcgcactgctgcactccagcttgggcgacagagcaagactccgtcctaaataataataataataataataataatcagaaaagaagctcaggaaggttaaatcacttgcctgggatcacacaggtgggaggcacattgctgacccttgaacccggaattctctgataccaaaggttgccttgaacccgccacagaagcccaggaggatgggtggtctggcctcctctgcttatcctacgaggggctggcacaaaagaactgatcacctcccccacatctaaccagcagccaagccacggagggaggacaccggggccccgggtggggtgcagggactcaccagcagcatgtggaccatagcatctgtgggctgtgggaggaaggccagtgatgagagccacgcctccacctcgtctgcctccaccgcggctgatgcgatgagttccttcatgaggcccacacagtgctccgtcccacaggaaggcagggcatccaacagtggctgcctgagatcatcaaggcgacccacacgtgctgagcgcctgcaaagctcatctcaccgaagtcacccgggggtaaactgaggctcagagaggtacggtgcagacatgcccaccctcacaccttgggaggggctgacccgggtctgggaccccgcagtctggctgaggcccgtgctctcagcacagcagcacccagcccagaccccggcagctctacccacccaagaaacactggtgtgggaaaacacaagtccgtacccagtgctctgctgaaacccacccaagcaaatgtcaccgagaaggggtaaaaatccctagcggaacaggaaccagcaatcagcaaacagtccctaatttaaacctcgaatactcagcacaacatcaggacatttattttttctttttttgtgagttagggtctcactctgtcacccaggctgcagtgcagtggtgcgatcacacctcactgtagccgccacctcctgggctcaggtgatcctcccactcagcctcccaagtagctgggaccacaagtgttcgctaccaagtcgagctaacttttaaattttttgtagagatgggggcattgctatgttgcccaggctggtctcaaactcctgagcatagccgtaagctgactgagttagtgcctcagagattcccctctgagattgggagtctctttacccgccttactagccccagatcagcaaggtctgggtggtggaatgccggccctgcccagcaccccccagcccagactctccacgcccccagcaggagggtaccctaggtgcattggaatgctaattccagcaagagggtccctgtctggggaagggaacaatggctgtctttatccgccaggcccttcagcttctggtctcaggcaggatagagcttggaccccgtgggaacctccaggctccccacttaatctccttcttggcgcacattctcagactgaaggacaagtcagtgtcaaggggacgggatgacgcatcagcatccatccctcactgggaacccaggacagcacgaagactcctttaacccagggatgcccccagccagctcctagtccatcccccacccggagagggaccttacccattgtctcggcatttgaaggaagaatattgccagagttccatcagctcacccccagaaaggccctggagctgggacaccagtgtcaggaacaagtccatggcctgcgattcagagggggcagcatgagacacccagcagtgcgggggatccccgaaggtcacctcacccgtcccctgcctgtaagcacaaccgtggggaaagtgggaaggacctaccaccttctcccaggatgtgctgagacccagtgagatgaagctccaggtctggcttctccctcactgcaccccaagcccctacaagcatacaagctggctcatttttctctgatttagcaggtatttattgagcacctactatgtgccttgcattgcactcaggatatggcagtgaaagaacaggcatagtgtctgaatctgtggcatctaataaaaccccaataaatgttcactatgattgtaatataattattctaatgagtcttagcatatttcaaatatttagcgaggtggcaatcttttcctacataatatacatactctttttttttttttttgagacggagtctcactctgttgcccaggctacagggcagtggcgcaatctcggctcacggcaacctccacctcctgggttctagcgattctcccgcctcagcctcctgagtagctgggattacaggcacctgtgaccacgtctggcttattttttgtatttttagtagagaagaggtttcaccatgttagccaggatggtctcgatctcctgaccttgtgatctgcccgcctcggccttccaaagtgctgggattataggcatgagccaccacacctggaccaccttttttttttttttttttttaagagacaggatctccctctgtctcccgggatggagtgctgcaacacagtcacttctcactgcagcctcaacctcctgggctccagcgatcctcccacctcagcctcccgtgtagctgggaatactggtgtgcatcaccacgctcagctaatttttttgtatttttcatagagatgaggtttcaccatgttggtctcaaacttctgggctcaagtgatcctcccaccttggcctccccaagtgctgggatgacaggtgtgagccatcgcgcccacccttttccaatattcctaataaaaaaattgttttatacaattattaacagtgatggctaataaagggcattatagggggtgcagagggcccaaaactcacaagaaataaaggactctactcagagaacagcccctgggtttaggagatgtttagtttggaaaaccttccctcctggtacccctgaagtctcaggctcactgcattggcctgaacccaaagccacagaaacagcaacaaggtaggagccgagccaagccaggtcccagcttcctgcagggaagcccccatactttccccaggcttggccagggccaggcctgaatcccccacccacccagaggtcctccgaggctgggacctgcttccctgaccctgggcctccctgctgtgtgtggctgtgacagaatccctgcacacgcagctcgatctcagcaagacgcagcctgcaaaacaggccctcactggtcactcggcccacctgccaacgtgtctgcccaccagagtcccggcagccttcccagaatgtgccttctgtggtcagagccagtggcaaccctcagctctgtctttccttcctccggcaggacccacaagccagcccctgctgcaggctaactgccaccatcgcagctggccctgaccactggtagcctaaaagactctattgcccagtttggggcgtctatccaaaaaatgtcagttccaggcctgcttccttccttccttcctaatgggctcggccacatttccctctggctggtggctgcctttccccagctgcccttggcaccctgggttcggaagacgtgtgcagatgggcacctggggatggtgcctgcccgggaccactcctcctcctctgggcaagcctctggccacaagtgttaccctgagaatgcgcctttcagatccaggcacgacaggagggatcattagtggcttatcctggtttccctccactggaggaagaacaaattcaaaaggagaaaagagggcagatctaggcaggctacggatggaggcaaagggtccaaggctcctgcctagaaatcaagtccagggcctggcgcggtggttcacgcctgtaatcccagcactttgggaggccgagccgggtggatcactggaagtcaggagtttgagaccagcatggccaacatggtgaaactctgtctctactgaaaatacaaaaattagccaggcgtggtgttgcatgcttgcaatcccagctattcaggaggctgaggcaagagatcacttgaaccaggaggtggagtttgcagtgagccgagattacgccactgcactttccagcctgagcaacagagcgagactccgtccccccccccaaaaaaaagacggatacgtaggtcgataagaaaactgccatccccatcaccaccaataacacatgataatagtgataaggctgggtgcagtggctcatgcctgtaatgccagcactttgggaggtcgaggcaggcagatcacttgcggtcaggagttcaagaccagcctggccaacatggtgaaacctcatctctgccaaaaatataaaacttagctgggcatggtggcatgagcctgtaattccagctattcaagaggctgagacaggagaatcacttgaactcgggaggcagaggttacagtgagccaagatcgcacaactgcactccagcctgggcgaaagagcaagaccctgtctcgaaaaaaaaaaattgtaataacaactacgccactagttacttagtaaggagcttttactatgttccagcaactggtctaagctgacagagaaggaaagtgacactcaaagtgattgaggcaggggccggtggccgcatgctactcagtagcagagcagacacttgaacccagggcaccagctcctgaacccacactcttaacaagcatcctatatgcaatggcttaaaaaaaaaaaaaaaagtcctgatttgtagcatttgccgatcgtcatggtgtaaatatacccaccatggtcgatttcaagctaccaacttgcaattgctaaggacagacctgggaagaaatgcaccttagcacgtcatgtcatatttccaccacacagttacaataaacatgactaacctctaatggaaagacaatagtaaaatgtagtaaaataaccaggtagtcatggttgggagtacttaatacctttgtttctaatataattcattttatttgatttttttaatttttcttttcttttttttttttttttttttttttttggagaagagtctcactctgtcacccaggctggagtgcagtggtttgatcacagctcactgtagccttaacctcccaggctcaagccagcctcctccctcagcttcccaagtagccacgaccacaggcacgtaccaccatgcttggcttattttttgtagagatgggctctctccctgtgttgcccaggctggtctcaaacccctggggtttaagtgatccacccacctcagcctcccaaagtgctgtgtttacaggtgtgagccactgtgcccggcctgtttacttgttgatacacaatagattcacatattttcagggtacccgtgaaataatttgatacattcatctaatcaaatcaggataattgcgatatccatcaccgtaaccaccttttctttacgttagaaacgttcaaattcttctcttccagctatttttaagtgtaggattatcttaattatagtcatcctaggaatctattgagtattagagtctgatttcttctactgaagtgtatatttgcacccattagtcagctatgctaaaacaactttatttattttattttatttatttattttgagatggagtctcactcttgtcacccaggctggagtgcagtggagtgatctcggctcactgtaacctccgcctcctgggttcaagcgattcttctgtctcagcctccaaagtagctaggattacaggctcctgtctaatttttgtatttttagtagagacagggtttcaccatgttggccaggctggtcttgaactcctgacctcaggtgatctgcccgcctcagcctcccaaagtgctgggattataggcatgagccactgagcctggccacaacttaatgtttaaaacagcagtgtttaacaaccagcctgtgggacatccggaagtctactcacccactcttgtgagccagtatgagccagtcctgttctgccactgtctatgccatttcgtgagtgtaaaccgtccttaataaacacctgtaactcgagctccttgttctcagaacacccaagattggtgataagccatgccctctcccaggcatccttcctggcagcctggagaagttggccctgctggctccgtctgtctgtcccctcccaaccccactgcacccttgcttcctcctcctttgttccttagggacgcccttggccatcccaccctctgccccccacatcgaaactccggggcctctctatggaaggcccgactcgggggtttgctttctattgagcgctgagtcctggttttgtttccagactgaaaaacaaaccttgtctcctgcccaccatcaatggggaggggcagaggcatttcaagccgaagctcatgaggtctatccccctggcaacccaggcaggccctcagccctcccgggggcccaggagctgcttggtgtgcaccgatgtgtccctgcaaagccatttctagcaacagggtcctcagcatttcacccctcagcccaggggacctccacggtggcagtaacttcctttttttcaatgctgtaagtaaaagacagccgcacagtgccctctggggctagcaccgccagcgtccaaaagtggagatcgaggcccacagcccttgccctgagccacccctgccaggggaaatgtccagttaggtggtcaggggtcctcttggggccaaagaatgcagtgctgtcttcccatcaagccatgaggttcggcagtgcaacggttagagcacaggccacagagcagcggtcccctactggtgacaagtgtgctccccagggccatctggttgccacggactgcaggtggtgatgatggtggtatccagtgaggagaggccagagatgctgctaaacatcccacattgcacgtgacagcctcccccacacactccacaaagaatgacccagccctcggtgtccacagcacccagggcgagaaaccctgctttgggccatgctgcctgggttaacagcccagctctatcacttgctagcagtgtggctttaagcacatttcctaaactcttcaagcttcagtttcctcatctgtaaaatgggcacaatgatatgaatttcactgagatgattaaattagataacgcaagtgaggccccggagcttattgtctgagcatacactaagtgctcaattaaactgtaaagccctggcagggcgcagtggctcacgcctgtaatcccaacaccttggcaagctgaggtgggaggactgtttgtgtccagaagttcaagaccagcctgggcaacatggcaaaaccccgtctctacaaaaaacacacaagaattagccaggtgtggtggcatgcccctgcagtcccaggtactctggaggctgaggtgggaggatcacttgagccagggaggtcaaggctgcagtgagccatgatttcaccactatactccagcctgggcaacagaatgagaccctgtctaaaaaaaaaattgtagaacattgaatggaagcccccaaaaagatatgtccatgtcctaagccctggaacttgtaaatttcccttatttggaaaaaggatctttgcagatgtaattaagttaaggatcttgagatatgatcattctagattatctggatgagtcttcaatccaatgacacatcactttcctcccccagggactgtgccatgctaaaccatctctctcgtgctttccatcttacatgtgggttcagggccctctctcagaacaagacagatggtgaggagaatctcatcatcacagcacagcctcagggcctcagattcttgatgatcaccaacgaaggaactggccctaagtctcaaagccacatccacctcctgacttgaaacagccaggagtttcggaggaggcctgggccatgtgtttctaactttgctgtgggaagtcctcaatgctgaggctcagatgttgctaggcctgggagattagactgtgagtcaaaaggactgttgtgtgctcgtagacagacagaggagaaaaggcttcccctctgctcacatccaacctggactggggcactggcctggcacacgccatctagatttccttgcttctgcaaccaggcacagctgtgcagtgcacaacctacccacccataggtgacagccctgatattaaatatctgagaggatgggccaggatatgggcaggaagaggaaggtgtcctagggactcagggccaagaaagactctggcctggggctggagaagccacttacctccaagctagtggtctgagccaggcacagcctccttactaatgtggctgcggtggccaccatggcctgggatggtgtctcctcccactcatacagcaggctgcttggggtcatgtcttcatcgtctctatcatctggatctgagatggtaagaggtggatgggatgaccatatggggaaatgccagagtgagctagaaagccctctgggagtcgcccccaccccctccagtgcttccttcagcatgtttcaggcaacaggtaagaggggtgtctacgagggaaatcatagcagcgtcattgcaaacagcctaagatgggaagcacctatgtacccaccagcaggggctgggcaaacaaactgtgggccactcacatcagggaacactgagtatccttttttttcttttttttttttttttgagacggagtcgcactctgtgcccaggctggagtgcagtggcgcgatctcggctcactgcaagctccgcctcctgggttcacgccgttctcctgcctcggcttcctgagtagctgggactacaggcgcctgccaccacgcccggctaatttttttgtatttttagtagagacggggtttcaccatgttagccaggatggtctcaatctcctgaccttgtgatccacccacctcggcctcccaaagtgctgggattacaggcgtgagccaccatgcccagccaacactgagtatcctttaacagaaacaagtcagcaggacacaccctgccttgtaaagatctccaagccatcgagtgaccaaggcaagatgcagaacaatgtatggtgcaaaaataaaaatagaccactctgtgcctggcacagaggctcatgcctgtaatcccagcactttgggaggccaaggtgggtggatcacccgaggtcaggagttcgagaccagcctggccaggatggtgaaacctgtctctattaaaaataccaaaaattagctgggcgtggtggcaggcgcctgtaatcccagttacacgggaggctgaggcagaagaattgcttgaacctgggaggctgaggttgcagtgagctgagatcactccactgcaccccagcctgggtgacaagagtgagactctgtctcaaaaaaacaaaacacaacaaaacaaccagaccacccaaacagacacagttgcctatgtatctgtaagtacacagaatttgtctggaagagtatactggaagccaggaatggagtgagcctctggagaggggggactcattttaaccgtgtccttttgtaccatgtcacacatcaccttgtcaaaacaataaatcttaatctctctcatgcattcgtcctgtgactgcttcctaataaagatgggtgatggcagaaactgccctctgctctacacacagccatggtgttaaacttccctgagccccgcttggacccccacatctcagccaaagacctaccctcgaatccacagtccacacctccctcagcttcaatgctccttagcaaaggcgtgtgccttctagatgctgtccaacaccatctggctgcctgcaggcctgggcacctgccctcgcagtgtgtctagctccacacaggtgcacacattcatccatctaatcctcagacctctccttagccccccaggtgcctgggacacacagaggtcgtgcctgccccagggcctttgcacttcctgtttccgccctgaatgctctttcctgcatcttcccaaagctgaccttgtcttatccttcattactttctcagagaggccctcttggcgcccctgtctaagtcactggctgtcatgcagctgtttaatttctttcctgacatggatcacagtctcaagccaccttgactaggctttttccccatcaatgatttccccctcccaggagggtgtcagcctcagggtggcagaaatggagttgaccatgatcacaggcctgtccccagagccccggcagtgctcagcacacaacaggtgctcagacaagcatttcgggtaagcatgaatgaaaacacactcctgatgacctgccaagaatctgcaaacctaaggagaattctcccacgacagttgggaaccagatgactccaacccagggaggaagacagggccaagccagggccatctgagcccagcgcggaacttcaaggagggataaagtctcatttctgagtatgcctttgggatcaggccctaaagaacggggccaggatgatgtgaaccagtgctcacagaggccacgtgccaggtgcttagctaaaggcaatgatgattttctttttttttttttcagaaggggtctcactctgtcgccaggctggagtgcagtgacgcgatcacagctcactgcagcctcgaccttctgggctcaggtgatcctcccacttcagactctcaagcagctggaattacagacacacaccaccatgcctggctaattttttgtatttttcacagtgatggggtttcgtcacgttgccagactggtgtcaaactcctgggctcaagcaatctgctcactttggcctcccaaggtgctgggattacaggcttgagccactgtgcccagctgaccattttctgtaactttccccataacctatggggtaaggggtgacctacccgtatatttacagctaaagaaactgaggcacagagagaagctattggcccaagtcacacaacatagagtcagaatttgaatccagttctgactccaaagcctcctgggaatgacagtgaaaatatgaaaaaattcctctgtacaatggaatattattcagcaatgaaaaagaaaaaaatccaattcatgccacaacatggatgaaccttaaacaccgtgctgagtgaaaaagctagacacaaaagggcacactttatgaccccatttatatgaaattccagaacaggaaaattagaggcagaaagtagttgagtggctgccagggtctgggaagatgatggctaatgagcacaaggtttctttttagagtgatgacaatgttctatagttgactaaggcggagcacagtggttcacacctgtaatcccagcactttgggaggctgcagtaggaggatcacttgaaaccaggagtttgagaccagcctgggcaacatagcaagacccgatttctacaaaaaatttaaaaaatagccaggcatggtggcgcacagctgtactggggaggctgacactgggggaaccccttgaccccaggaggccaaggtaccattgcattccagcctgggcgacagaccaagactgtctcttaagttgaaggctgggcacggtggctcatgtttgtaatcccagcactttgggaggccgaggtgggcggatcacctgaagtcaggagttccagaccaccctgatggtaaaaccccatcactactaaaaacacaaaataagctgtgcatggtggcacatgcctgtaatctcagctactcaggaggctgaggcaggagaattgcttgagcccggaaggaggaggttacagtgagctgagatcatgctactgcactccagcctgggcaacagagccagattccatctcaaaaaaataaataaataaaataataataataaaggggcctggcacggtggctcacgcctgtagtcccagcactttgggaggccgaggcaggcagatcagacacctgaggtcaggagtttgagaccagcctggccaacatggggaaaccccatctctactaaaaacacaaaaatcagccaggcatggtggtgcacacctataatgccaggtactcagaggctgaggcaggagcactgcgtgaacctgggagaggaggttgcagtgggccaggatcacgccactggactccagcctgggcgacaaagcaagcctccatctcaaaatataaaataaaataataataaagttgattgtggtgatgatggatgtacaactctgaatatactaaaaaccactgaagtgtacactttaaatggtgaattgtatggtatgtgaattctctcttaataaagctgttaaaaaggaggaaaaaaaaagaaatctcatccaactcagtgggacaccactgggtcctggcaagcctggatgcccccaggcacagctagtttctgtagctgagggtcggtgtgcggggagggcagaccaagctgggatcctagaaggcatcccatggtgcagagcgaagtcggagaaatcccaaggtcccatctagtgggttctcccccagggggtgccgggagcctgccctccaaggtaaacgctattaccagccagagctgcagaacacacggcaggggttcaggtcccagccctgcctctcactcaccgtgtgaccttggacaagtcatttgacctctttgagccacaggtcacttatacgaaaaatttaatcggcggggttcaacagttcacacctgtaatcctgtaatcccagcactttgggagggcgaggtggaaggattatttgagcccaagagttcgagaccagcctgggcaacatagtgaaaccctgtctcaacaacaacaacaaaaaattagccaggcatggtgctgtgcacctgtagtcccagttacctggcgggctgaggtgggaggatcacctgtgcctggggaggttgagactacagtgagccatgatcagaccactgctctccagcctgggcaacagaacgagactgtgtctccaaaaaaaaaaaaatttaaaaatttatttatttatttatttattgagatggagtcttactctatcgcccaggctgaagtgcagtggcatgatcttggctcactgcacctccgcctcccgggttcaaacgattctccggcttcagcctcccgagtagctggaattacaggcgcccaccactacttccaactattttttgcatttttagtagagacggggtttctccatgttggccaggctggtctcgaactcctgatctcaagttatccgcctacctcggcctcccaaaccgctgggattataggtgtgagccactacatctggccaaaatttttatttaaatttaactaattttaccttcctaatggggttttgatgagaattaaattaaattaaatacacataaagtgctcagcacagcaactggcccacagtaaatccttccaaagtcccagcagtaagaataaccattcttatttcattattcaggaagacaactggtttccaaacatggaaaagcaatcctccccccagatataggcctcgcttgtttctttctgtgcagaattgtaggagggcaccaagtcccagggaatgctatgtgttagcaggaactttctggaaaatcaggaaacctgagtcagtttgcccctaaaatgggcagactgaggggtcactgaatttaaggttgagaaacagaagattccatcttcaccaaggacatcccagggaaaagggactcaaccaagccagggccatttgatctgagcctcagaaagagcctggagaaccttctagaagtggctaactctcctgatgataaccattttcagcaataggtcagaggtgtccaggccgggacagaggaacggaacctgggcctgcttgggcccctctggccagaccccctcatgccacggccagggggtggccaccagggaaggctgaggtcacctgtgcccgctggatcttggggcatctcgtgcagcagactgagtgaggagagggtcctcatctgcacagcgcttgcctttgcaggaagtggccccgcggagtccagctctgtgcaggaggcctccctcagcactccggcccggaagctctggacgcaggtcaggcgggaggtcaggccgggctgcggaccaagaggggaagggacagctcaggccaggatctagccatccacaggacccagctgggaccaaggggaggagggacgagggacacatcagagctgtagaccccccattccccactcagcgaggctggggaggagaccctgagggctgcatccctgcgtcacccacccctggctcgcctggattgtggcaacatcagcccaggcaaaggcacaccggagatgacaaggacgaggggaaacaagaaagtctagcagacagtgaccccccaggagaggaatgacaaagcgtcagtatgaaaacatttcaaacagcagaggcccacctccacctcttagatgctgagacttttgatagtaagtgaacatgaacaatgatcacttctcatcctcctgcagatgtttggtatttacaaagcacttgcctcttcagggagctagagacagaggcggggaggagggcgtggggaaaaggacagaggggcgggcgtggtggctcattcccgtagttccagcacttggggaagccaaggtggccggaacgcttgagctcagaagttcaagatcagcctgggcaacatagcaagacattatctctactaaaattttttttaaaaaactaaccaggcatagtggtgtgtgcctgtagtcccagctacttgggaggctgaggcaggaggatcacttgagctcaggagttcaagatcagcctggacaacacagcaagacaccatctctactaaaaatccagaaaaaaaaaatttaaccaggaatggtgccttgtgcctgtagtcccagctactctcaagaggctgagacaggaggatcgcttgaggccaggagttgaaggctgcactgagccatgatcacaccactgcactccagcctgggtgacagagtgggactctgcctctaaggaaatacatacatacgtacgtacatacatacatacatacgtacgtacatacatacatacatacgtacatacatacataaaataaaataaaatttcttgaaggaaagaggagaagggaggggaaggggaagggaggagaggaggtaaaggaaggaggaccaagaagagaaggaattggaagagaggaggtaaaggaaggaggaccaagaagagaaggaattggaggagaggaaatgaagagctgaggagggaggaggaaggaggaggaaaagggaggaggaggaggaaaagggaggaggaggagaaaaagggaggaggaggaggaaaagggaggaggaggaggaagaggaagaagaggagaagggtctgggagagcagcagtcaggggcccggcccagcccagcccagcccagcccagcccagcccagcccagcctagcccagcccagcccagcctagcccagcacttacagccactccaggcagggcctgagaatggagtgatgagcgtcccctgcgcagggagcaccgtgccaggtcctttgtcttgtgtagccagtccccatggtgctggtatgtggtaggacatcggcccaggatgtccacctgggcagacagggttggggacaggtcaaccttctggccacctctaccccctacccccttcccatctcctggcctcacctcatcaaaggtcttggggctgtgggcccctgggtggccctgcaggaggctcagcacagcacgcttcacgttcagcacccagcgtggctcagtgggatggggacacaggtgggccacacgcccagagtgcaggatgaagcggagtgggttacggcccagggtggcactgcaggagggcggacaggggtcaagcgggaccctccagtgccccaggccacttgcagactgccagaggccacagcatccctgccttcctacaggccagcccccatgggaagctcccagggaaccccacatccccccactagatagcctttgttccctctgcagctgggctctggggcagccaactctgctctgagccaccccagccttttcaccccgggacaaatggacaggtgtgtgagacaagtgtcaaagaataaaaggctgagaccccaagagctgcctgcattccaaaacgcctcacttaatcccaaggagctgaaggcattctggatgtgccaccccaaaatatgccacttgggaatattgccttttttgtggaccagtctcgctctgttgcccaggctgagctcactgcagcctcaaccttataggcttaaacgatccttctgcctcagcctcccaaatggctgggaccacagacatatggccaccatgcccagctaatttttaaaccttttgtagagatagattcccgctacgttgcccaggctgatctcaaactcctgagctcaagcaatcctccagcctcagcctccaaagctctgggattacaggcgtaagccaccgcactccagcctcttgtctattttgaaccaaagactgtatttgttgagaaacagcaaatacggggagaggctttctctgaactcccctcttctgcctaaagacagatcctccaaaaggaacctaattgtcatcaatgccctccagggagtttcatccacctggggagagcagctctcatcctaagagaggatggtgcaagtcgacaccacacccagacaaactttatcccacactagcacatctcctgtctcttcttccaagggtcccttcctctttcctagaaaccatctactcccctctaacttgtctcgctccctcctcccctttcccctgaaaatggtgcataagctcccaagtctcagcactctggggagccttcactctttcattccacgatgcccctgtgcatataaaaaaatctatctacctcttctcctaatgtcagtttatttctagacacagctattgaacccaggaaggtagagggagtctttccctcccctacagatcccaccagggaggtaattatcatccctccacccacattctggatgaggaaacaggctcggagcaatgtagtgttttgctcggggctccagctgggatttgaacccagccaggctggctgtggagtcacaggctgcagaaaccccgaactggaagtgacttgagactgtcattgttgagacaaggaaatgaggtcccgagacgggggccttcttgggggatatcacacagcaagtcagggaaggagctggcaccagaattcagccccgtgctcctcccgcctgcccttcccctggcagaaaggtgcctgggtctggtatctgcagagtgaagggacggggaagtgaaggggtgggaagtgaggggtgatggagtcctccttccctgggtggagttggaagacagagatgcttcaagatgaaagggaaactgccaagtccccagaccctacaggctagcaagacaaaaccctggggaacagatatgttaccacttctaccttccaggggggcagcggtcactctccagctccaactgaagcctggaggtcttcctaaggcagtcccctgggtctcaggccttgatggagagaaatgctaatggcgcccaccactcccagaatagcaagtggcagtgtggcctccaggaagtgacaacccctggccccgctgacttagcatttctgatgaggagctgggggacaatagtccccttggaggagaccctccccttgcctttcagtgaggatctatctgtccctcagcagcatcccccatcctggtatccctagacaaaggctttctttcttaacaaatgaatttgcaataaaaacggaagaggaatctgcagagaaggagttgtcttcaggctggcggctgctctgagctttgaggccaccgaggccctgtcagggaggcctgggaaacaagccacagggagaatcccaggcttggctgggtcacaaaagaggggcttagcttggggtgggagaggatggggtctcggcagagtcggggaggggaaaaggcagacctccatgggcccggcagtcccattagccggagtcttccagaacacactcaacaacaatgcccaaggggtgatcggcaggtgtgaaatctggacatgctgggggtcacaggcagaactacgggatgagttcctcccaccaggtaagagaagagcacctgcggctatctggagtcacccaaggcttctacatgaaggcagccccccagcggtcttcatcggtgcttgacaaggtcaaaacaaatacagaaacttctttgaacttcagtccaagatggcatctctttgctacagagaggtcaccctaaccaattgtcctaatctaattcagtgcacccagagcccgacagctgttgaaagacggcagagggctcacagctccagccccatcgtgagcaggtcccagccccatggccaagtgtcttacctcaggctctccgactccttcagaagctccaccttggcccccaggatggatgtcacctggaa

SEQ ID NO: 471 - DNA, 169234 bp, Homo sapiens
atgctcagaagccgggcaggttttggtctcaagcacgcagcctgtgcattacaccagctctctcagtccggggaggaggaggagcaggaggaacgcgaggaggaaggagaggaggagcggccagcagtagccacgaccgccaccaccaggcagaggaagagttcgtggggaggaaaagacctctcctcccccttggagcgccttctctctgcttttggagaaagggaatacacgataaagaaggagacggaaagaagagaaaaagtgaggcgggagacagagggaaaagggcgtgaacagaaagggccggagcgtgcaggggagcacagggcgcgggggcggcactgccgagccgggagcgctgccgcttgggcaggtgccgcggccgctgcccggaggcggcatgtgacgcgcggccgcagctgcccgcgggcggagcgctctcagaccccggagcgcacaccgcggggccatcggtgccatcgcggatctccaggctcctcatcagtccgccggggccgcagcagcgcttctgggaagacgggcgatgaactgaagggcggctccgggcaggggggcacgatcttaaggacagtcgctccctgaacgcggagccggaggagacgaagggaaggtggagcggacgccacccgcgcaccgggcaggcgcggagaccggcgtgggacagccacctggagcgcagctgccaggtagggacggcgcccgccacccaggcgctgggcagagcgggtggcggtagcggctgacctggtttcttgccttatctcgttgcgaaaggaggaaaaagttttcggcgcgggtaggagaggtcttgtgtttggagtccaaagaaggggctgggtagggacgagagaggctgttgatttggggaagatgggggcacttgaattccgacagcgcgatctggtgcggagttggagttctgggactgagggtggggaacgcccgctggcactcaagtgccccgaaagggacgggaatcatgcgagcggtggccgggagagagtcggggacgtcccaccccgctctccctcgcttcgattctctcttcgccactgccggatctgaggctccaaagtgcccgagcatgaggagctactgggctccgggtgtgtttgtgagcgcactcgtgtgttgagcgtttgtctcccatctccccatttggtttcctgtcatttctaagaaggctaaagctggcacccgccaacctcgcagtggggccgcaagttcggattgcatttcagggggcgagaaggcaaatttggcacttcgagtaacacttgggcgaaggtacctagcctagtgcgcatctttactgacccggggagagtctgcactcgcgaggcagcggccgctggactgcaccggttctcctctttggaacacttcctcagcatagcctcctaatagcgaggttaatttttgcgtgtttttaaacggcgggggcgggcggacagttgactccagcagcagaattcacttgtctacttcgcggtgtgcgtgctggaattgagatcctgttctgcatgcttgtgcgtgtgtccgactctccttgcacgcatttggaagtggtagaggcagcagggatttgggaactgcatccatatggataggtttcaagaatgcaaaccttcatttgtctgcaagtgttactggaacctgtccaaaggctgcaaggatatgtcccctcgatccccgccagtgtccgtgtttgcaatgtgaaagggcggccctctttaggacaaaaatgtatttatcaaagcgatgtgtggttaagaacactggttatttcaccatatgctttgcacagacttttcctttctctcttgccctctgagttccaagacagataacctgtcccctccccccattttgacctttgtaggttactatttgaaaaataatttttaactgggtgcagtgattatatagtccagataatttcatattgtgagatcgttatatcgcatgaaccattcatcattatttcctgtgtttaaaacaatgcccatgtatttacttaagagagactatgaacatatagttcagaaaggggaaaactaaacctagagcagatacctgcatataagcgtattgtagtggtagcacgttaataaaaaactaaggtatttctgttccaaatattgtgggatagacgaggtgttgagtgcaccctcttgttataagagctgatatcccgaagtatacatgtgcaaggaacatgcctgcttcttcagtgtgcattccaacatgccacagaaatgtggtttacatcatagcttctaccgccgaatagtctatctttagattttgtttacatggtttgtctcaattagcttaatacataattagctattgttgggctagaaagcacgttatttttgtagtggtttccatatggaaatataacgttcgcttaattactaatttaaaaataatgacattgccggtcggatttagaatgtttctctaggttggggggtattatgagatcgaatgtagcacgaaaatagcaatgtcgaaatattgttttttaaataacgttgcgtcattaatcgaatgaacatgacagttgaaaaagaaaatgagataaaaagtagactttgaaaaatctttataaattttctgtgtggaaaattattgtaagggaaaaatgtaatttgggaaaaggagcaaatgtggaattggtcaagttttaaagaaagaacaagtgttataatgagtagttctgtattaaacctacatttaagcttatttaggaaagtttgctttaaaatttagagaaatctatgatgaatattcagtaccctacttttattctggggtagggggaagtaaaatgtcacttcaaaagtattatttacttctgaagattatttaggcatgtgtaaaagttctttagagtgtaccttctcattttttccttataaagacaaatgatttaatttcttaacaaagaaaatttgttataaattagagtatgtaaaaatgtgaagttcttttaatgatattttagcctttaattgcaggcaacctgttgaaagagggcatggaaaaaatgtgaaattggcagacatagaatttcttagattcacacttgtaaattgaatagacagaaagttaaacgatatggttaaaagcaaagttgccttatgtatttgtaaattataaagtaatacatattttcagatttttagttaaaatctctgtcattttcccagccaacatattgttcttgcctaataactttgttaacattggcaagctcagttgcttactgctaaatggcctggacgattccagtgtgactattaagaaattgggtcttgtttgcagtgccgggaagtttatactgggaacagctgtggtgtagtggcactttagataggagatgaatgaaccgtgaatcatatgaagatggagactgatcagtatgcagagaagtgtatctgtccttcacttatggaacctgattttatatcatatgatgactaatagcattattctcacagtgtgattttggaggatcagtgagtaactagagatgttgtcttttatgtttgtgaatttaaaatgtattctccttacataagactattgtaaaaggtatctatgagcttaataaaattgtaatcaaatccctctaccacgtttacttttaaaagttaatcagcataataaaatgtgcctttatgcttaattgtttaatatagtgttttcctagatgcaatatatttttcatctataaagttcagcaagtccagcagaagccctgttctgaaaaattactagcctttcagaactttggaataaaatttcaacatcaatggaaagttttaattttatgaagagataatctaatgtatatgacaggaggcaaaatcagttaaattagaagttagtttctggtgtctgaaaggccctatcttctccattagggaatatatctttgttcagatcaaatgctaagcagagtatttcttcaaatcactcatcactgcattgctccctctgcccaccctccacggagagggtgtgcaggtatgaaaggcttccctcactttttttttttttttttgagatggagtctcactctgtcgcccaggttagagtgcagtggcatgatcttgactcactgcaacctccgcctcccaggttcaagcaattctctgcctcatgaaaggcttcccttttcatcagtgaactagcacctggagagctctgttagcctgctaccttccctagcagttgcatgccccagacagtatagatctccattagtgttgtcttcaatgcaagaaataaaaataattttggtctgggcacagtggctcatgccagtaatggcagcagtttgggaggccaaggcaggaggattacatgaggcaaggaaatcaagatcagcctaggcaacatagccagaccccatctctacaaaaagtgtaaaaacttagccaggcatggtggcgtgcacctgtattcctagctactaaggaagatgcagtgggaagatagcttgaatgcagaagttcgagactgcagtgagtcaggatcatgccactgctctccagcctgtacgagagtctgagactctgtctctacataatcatcatcataatagtaattttggtttggtgaagcaattgaaaatattaaaccataatgtggcttatgtgataactgtgtgacctcaaacatttcattccccactgtacacttgaagaccatagtagttgccctgtccataccatggattggttttgagaatccagtgcatgtggatgtgctttttgaacaaactctgaaatgcagtgcttgattggaacccagagccccctcagtacaccatgatggacagcactgagcgccagtatgtagtggccctctggctcagtttttggcctctgtgtgttgttttctatccagaagttttggcagcttgcagattccccagcctctggcaggctctctcttttaggctggcgatctgcattctcccacctgttggaacttcccgctcatcccctcctgaaggccaaggactctggctgacgtgcaccttcttagcttcctctgctgaggctgcagctgcagcttgccacattgacacagacctagggtccagtagtgatgacaggaagtcaacagaaggaatattctgagcccctgccagcttctcaccaattgtgccagttcatcctgaagccatccggaatatgaacactttgagaaaaacaatggtggccaaaaattaaaaacaaaaaacaaaaaccaatttgataaacagtagctggcagatgccttgtgggctttgagaccttgcctttccaagcctgctctgcatgggactcaggagcctggcccttctgattccacaaccagtgcagagtctgtcctaaccctagtgagctctagcaattctcatgcccccctcacctcagtttctctaactcctgtcatatttaccatttcgtaggactaggattttattgagttttcaatttgcactttcagtactggatttaatgtctggcctgggaaaattttagctatgaccttggcagtcagcctcgcccttgccaagaacttctctccaggagcaagacccctttctttctattctgtctctgattcaatctcagtgtgacaaacccttggacctaaggcacagctcctctcctgacagtgcatcatttccgcctgagacttgtagtgcccggttccacttgacaaataaattctccttgtctgtcattgttggcaggatcaaatctcagttctccacacctctcccaagcaatgtaatttgagtggctgactatccactacagaattaatccttcattaggtcatttgttctagcccagtcctagcctgcttcctgtccccactgttcccttgaaatttggcatgccagctgagccatgacatcgtctaccttctgtcacctctagcacaggaagtggtgctaatgtagacatcctggttcaggcaggatatccgccgactactgctgttcagataaaattcaggtgagtttaaaccaaggtgaaatactttcagcctgttttggagagagttcccagagagaggggctaccaagtgtgtacttccctgcatttatggctgtgaagtgttttggtgctcttctactgaagccttctaatttaccataggtagctatggctatagacatagatacatataaaaatattctgtcactaaactgtaggaaaaaggagctgctaacagcctttgtctacattttttaagacttgtcactttggagtacattttctcccactagaattgcccatgggatccagactggagggaaacctggttactgctaactattaatacatacaggccaattcttgcccacagccatttgacattccatcgagctagctctcacttccattgaaacctaatccagtggtattttgtagactcacaatccatataaattttggctgagcatagtggcatacacctgtagtcccaggtactcgggaggctaaggcaggaagatcacttgaggccaggagttcaaggttataatgtactatgattgcacctgtgaatagccactgtactccagcctagacaacatagcaagacccccatctcttcaataaagaaagaaagaaagaagatcccatataaatattaaatattgttgggtttttggcttcaaattgacaatatgttgatgactatatttaaatgtatatccatagtcatttaaaaatgttattgaacacagtcttttttgtgatttttcaattttcttagtgcaaaatagtctaaaagcacaacttctgttgtgggaggtctctcaaacgatttacattgaaaagaagttctcatacttgaaatagacgtgatgatcctcctgccgtgtttcctgtgctttctcacatgcccgataacacatgccacatgcagtagcttgtgtgaagggagaggtgatgggaatctggaatggccatgatgtttctttatatggagtcctcctttcttctctcctcaccccagatcctttccatcatgcaaggaccagccaaactcttccagctttccttgagcgcagctatcattctgtttttccctgtgactaattattttaaatcccttgattcatttgaatgttagaaactgaaaatcggtctgactaaacaactacaaatcacttccctctactctgaatactagtggcactcaccatttttaatataaaatttgatgctcaaggataacccaggtagtatttattttgattctctccaaagaagttaccttcatgagagtatataagtaaatatataataaatacatgtttgagtagaatgagtaaatgactcaatcattccatctatctacctatcaattatctatctctttatatctaatccacctatgttcatttacataggtgttgtatatacatccattatcacatctttcatatcagtatcatctaatgtgcaaagtaccatggacattctgttttggatacacagtaagtcaagggctctgcttttcagagcatatgatcaatgtgagtgtaactaaacaaatctgggttggaaggggatgttagatgttgcgtgaatttcttaggttttaaaacagaagtttattctttcacaattctggaagccagaagtctgaaatcaaggtgttggcaagactgcacttcctctaaagaccctaggggagaatccttcctttcttccttcagctcctggtagctatctgcattccttgacttgtgagcatatcattccaatctctgcttctgtggtcacgttgcctcctccacctctttcactgtctcctcctgtatatgcctgtcttataaggatatgtgtgattgcagtgaagtcccagccagaaaatctaggataagctcctcctttcaagagctttaacttcatcacatcacatcttttgtcatataaggtaatcacagaacctggggattaggaggtgggcacatcttttggagggaccgccattcagaccactgcagatgtcattaatgaacaacttttggctttggacctctctcttgtgttaaactgtgcagtctgtatgtttgagaaattaacactcaccaggggggtcattccattttcacagagcagtgagatgcagatcccctttatattgagccaaaaatctaattctcattgtacttatttgccttcttaataattctgagaattatgatgagaacacttctgatctttcttccacaagaaaatctttaaagttgagaagtttaaagttatttcaacctggtcctatgtgccacttctaaattttcatgatttttcttaaccttttcaattacactcaccgaacagcaatcacactcccctaatctcattaccctctgactttaaatcttttgactcctctcatccaccttcatgaggtttatagcaatgacttctccaaaagtcacctgtaacctcttagtcataaaacgggtagcccttccttgtctgtcctggttaatctcttagcaatccctttaaactcccttaattttcagagaattatacctacctagctctcttctctcctctggttcttttctcttcttcctgttccccacccctattttctgcagagtgtagggctttccagcaatttctccctggttgactcccatactcttccgttgcctctccttttgtacctgcctctgtcttcacgatttcaaataccctttccatgtgggtcacttggcttcagtaaggagcatttccatgtgcttgctggatagcacagccttcccctccttcttcctcatcctgttcccctcctggggttcctatttctatgaatagcatgaccatcctacagctcaaatgttatgaataaatcaagtgatcttgatttattctcttccctcacctcctacatttagccaggtaccgaattctaatgattcaaccaagtaagatctcaaccttcttggctactttcccctcctgctaccaatatcttaattcatcatttctgcaacttaaatgtgcattcagatcacatagggatcttgataaaatgcagactctgatccatgagggctgggttggggcctgagaatctgcatttctaaccagccttcaggtgatgcagatactgctcctctgtgctcagaccacactgagaagaaaggctttatgttttagctttgtatcttttcttagtctctgagcttcccagatgatctcattgatcatattattgcctttgatccattttacacagattactgttattgaggaccaaatgtgatcatctttctcctacccttgaacaccttctttgacatcaccttccattgcctgttgaataaagactaaatgtctcgcatcagcttcaccctatttcatggcttgggtttgcatgttgagttcagtctcaagtctcaaggtcacccttcactttaccctggtacttgctgttgcaggtatcctcatcctctgccacgttctcttgctgcataggatgccctttgtgccacatcatcagggatccaaattttagcaatttgtcaaggaccacttgaaacgaattcatcttctgttactctatcagaatctcacttttatccctgattacattcactcttggttttagtgtgtgtgtgccacaaattgtttgaaatatcagactgtgaactccttgaaagatgctgtgttttgttggtctttgactgctttcaagtatctagtgcagagtcttcttcataaatgctcagtgtgcacattcgcatataaaatatgtaaacaggcacagtggctcactttggaaggctgaggtgggaggatggtttgaggccagaagttgaagaccaacctgggcaacttagcaaaaaaaatctctacaaaaattattaaaaatcagctggatttgattgtgcacctgcctgtagtctcagctatatgggaggctgaggcaaggaggatcccttgagcccattagttcaaagctgcagtgagctgtgatggtgccactgcactccagcctgggcaacagaacaagatccagtctcgaaaagagtaaatatagtgtttttgttgtttgtctccttataaaagtaatatatgtcatacaaaaattcaaacattatggaaatatatatcaaaagtaaaagtccaccataacccaatgcccccaaagacaactatggttaacagtttgatgtcacgacaggattgcctctgatatttttctatacatattctaacatttactctatacaaaactgggataataatagactcttgcaacttgactttaaatgtaaatctatctcctcttcttaaaatctgcaacttattccaaaagattgactgatttaactgcataaaaaccaatctgcttaaaatggcctagcaatgtagaaatatgtttgctttgaatttctgatcacttaaatatgcctttattcagcaatttctctctctgctcctcagattgtgctagacttcggatctgtaacagtaagacacaaatactaccccggaagttccaagctatacttatgtctttaggctaatgttgagtgatgaactgcgggtgaagtagtaatcatttatctttgatgacaagttaaaattatcatatttgatgacgtgaactctcagattgcaattttatactgaaatgtaagttttcaaattattttgctccataaagaataggtgactcattttgaattctgaatgtgtacatatttatctatcatctaacacacatatgtataggtatattactttttgttccattaatgaatataaatttgaaataaaaatatagaaaatgttgtggccgggtgtggtggctcacgcctgtaatcccagcactttgggaggtcgagatgggtggatcaggaggtcaggagattgagaccatcctggctaacacagtgaaaccccttctctcctaaaaatacaaaaaattagccgggcgtgctggcacatgcatgtagtcccagctacttgggaggctgaggcaggagaatctcttgaacccgggaggcagaggttgcagtgagcggagatcgtgccactgcactccagcccgggcaacagagcgagactctgtctcaaaaaatacatgtatttatatatatatatatatatttctataaaatatataaatatatattctataaaaatatatctatatatatttctatatatatatagaaaatgttgtaaaagatataccaaaaattttagtgtatttaataaaactacaatttaggaagaagcagtgtgaaaaacaaaaggaaaatgttatgtgagccgtgtcttagaatgccagtaactgggggcacacaataaagcatttgttgaaaagaaaattcttttagaagtaaacatcaatattccctttgaaattttggagagataagtcttcataatgatgaatgtttgttactgataccatatttgtcatttaagaaatagttctgttgtggaactcgggaaggtcattttcctgggtagagggaggacaggagtatgtttgaggaacctagagatagcagcaaaggagactgtatcttatgaagaagaaacttaaaagtagaatgtaagacaataaaagattacaactttgaatcaataggagacttttgcagtctgggttagtgaaattatataaataatgtatttttttctttttgagatggagtttcgttctttcacccaggctggagtacaatggcatgatcttggcccactgcaacgtctgcctcctgggttcaagcgattctcctgcctcagcctcccaagtagctgggattacaggcgtgtgccaccacgcctggctaatttttgtatttttggtagaaacggggtttcaccatgttggtcaggctggtctcgaactcctgacctcaagtgatctgcccgcctcggcctcccaaaaagtgctgggattacaggcatgagccaccacgcctggccaatataaagaatatttctacatcttctatcaaacccctgaagattttgtccattggtatagttaatatgtctcctcccatatggattgtgtgtttcctgtagaatttaatacaagtgaaaattgaacctcctttggaataataagagcaattatctgataataaaattaaggcatatttatttcatttttgcattggctgctaggaaacttagacctaaaaataacattcaatcacagtggacagttttgcttggtttttctgtatattacttcccttttgttttaggatttttcttaacctttcagttttaatataagcattctcagattctctttggaaggcaagcaggatataacttggaaatgtatagtctaaaattatacccacaaaaaaatgcccatatattaaggtaagaaaaaagaaaaagaaaggaagtgaatactttgaaagcagattaaaaaagaaaaagtaatatgttggaaccaaggtctctttgaaggcctgaagaccccaggaaccaccatgggcaaagaaagtaacttttagccaatgcaagatatcctgaagaaagaacaggtaacgatggtgatgatgatgatgactgctgataattataatgaattataaggcttcagattttcagacaatatctcattgaatcaacagccctcttttttcatgtatagttgacaattaaacattatatatatttatggtgtacagtgtaatgctttgatatcgtggtactttgtgaaatgattacatcagactaattaatatatccatgacctctgatttttttttttttttttgctgtgagaatgttataagatctattctcttagcagttatcacgtgttagttatcattaaccatagttatcattgtgttgtacaatagatctctcaaacttattcatcctaaatgaaactttgtaccttttgatcaacatctccccaaccatcaccccttccctgtccccgctggaaactcccattctactcttcatctataagttccactttttgggattctgcatgtaaatgagaagatgtggcattggtctttctgtgcctgactcatctcacttaacacaacgtcctccaagtccaatcatttggttgcggaggaagaattttcttctcttttaagcgtgaatggtatctattgtgtatatataccacattttctttctccattcttctgttgatagacacttagtttggttccatattttggctattatgaagagtgctggagtgaatatgggagtgctgatgtcactttgacatattgatttcaattcctttggatgtatacccagtagcgggattgctgggtcctatggtagttttatttatttatttatttttattttattttacttttttgagacagagtctcactctgttgcccaggctggagtgcaatggcatgatcttggctcactgcaacctcggtcttctggttcaagcgattctcctgcctcagcctcccaagtagctgggattacaggtgcctgccaccatgcctggctaatttttgtattatgatagatagggtttcgccatgttggccaggctggtctcaaactcctggccttaagtgatccgcccacctcggccttccaaagtgtggggattacaggcgtgagccatgactcttggccgctagttttatttttatatagctgttggccatttgtaagttttattttgagaaatctctgttcacatcttttgcctattttttaatcagattattttcttttttgctattgagtttttgacttccttatatgttctggttattaatcccttgtcagatggatagtttgcaaatattttctcccatagtttaggtcgcctcttcactttgtttattttttcctttgccatgcagaaacgttttctcttgatataattccatttgtctatttttgcttttgttgcctgtgattttgagatcttacccaaaagttctttgccgagactaatgttctaaacattttccagtgtgttcttatggtggtttcagagttttgggccttaaatttaagtctttaatccaatttgatatgatttttgtatttggtgtgagataagatccaatttcattcttctgcatgtggatatccagttctcccaagtgcgtttgttgaagagtatcctttcttcattgtgtgtttttggcatctttgttgaagatcagttgaccgtaaatacaaagatttatttttgggctctttattccattccattggtctgtgtgtgtgtgtttttatgccagtaccatgcagtcaacaaccctctttaaatagaaattgttattatcttttttatatatacataaaaggaaactgaaacatactgaggactttcctcagcttaaacagctgatgatgtcgcagaagctcagtgaatccaggttgtaccatgttgccttttatataaaatgcgtgcatatctttctcatcagaagcaggaaccaggcaaaaagagaacaacccaagggtctaggcttgaaaagaaaatcaaagttgattctgggagggactgaaacattcccacagtcttagggacaggcctagaccgtgttaagctacggatgaaatactgattatcaagggtcaggccacaacatggaaccgggctgaataaagaaactggtacctgggtctgaaggctgtggcaagtaagacagcctgtggccattctccagcttcatcaaaaacagaaatctgtgctccataacacttttctactgcacgctcagatcttcttcctcccacactggcactctccaccctgcttctctgtaagatattttcctctaactatggaacgtttgacttgactttccttaaagtacactttttcttacccttgcaacttttcaagttaccattctgtattttgtcttctcctgatcccaaaattcttctctctcttttttccttttttttttcttttttgagatggagtctctgttgccaggctggagtgcagtggtgcaatctcggctcactgcaacctccgccttccggatttaagcgattctcctgcctcagcctcctgagtagcccggactacaggcacacaccaccacacccagctaatttttttgtatttttagtagagtcggggtttcaccatgttggccaggatggtctcgatctcttgacctcaggcgatccaccctccttggcctcccaaattgctgggattacaggtgtgagataccatgcccggcagactttgaggggatttttaagattatctaatggaggcctcttattttatatttgaggatcctggaatctgaaaaggttgaatgccacacccaaagctgcaaaactctaagcctggatcttctgactccatgtctaagtttctatgtagactcctgctaagtcactgcctggagatgacctggcctctttattcactcttgttgtttgcagcggcatttacggcatttatggcatcaagtattagtagaaacagatctcaagtgtcaaaccccctcccaagtgctacatattcatttctggccctcttttagacatttctacaaagaatatccatcaggcacctctaatgtatgatttggagattggaacccatcacctttctccaaaatattccactcttcctacttttcctatatgcattgatttcatcacagtgttccaaggagaagcaaggattcagacttgaatccttctgaatgtttgcaaagataacttccctctttacgtgcagcttataagtcctattgaattttcctaaactgcaccacattaattacttgccacctgttctcactactacctccttgatccaggtctttcccatcatctcccccttacaaggctccaatagcctctaacttgttccctgctttcagtctcttttggattttacggttctgtaacaagacctacaattttacctctacgtaacttttgattccatctccctttccccgctctgtcatgtcactgtagccacatcagcctgcttgtggttctttggatgtgactccattgtccttcctctaggtttctgtggaaaccacacttccaaatttattctccctagcttggctgtagctgtcctaaaaatattaggcctgaagtcctcaggaaaatatggtcgtccctcagtatccaacgggtattggctccaggacctctagtggataccaaaatcacaggatgctcaagtctcttgtataaaacagcacagtatttacatataacctatgcatatcctcccatgaaatttaaatcatctctagattacttataatacctaatgcagtgcctacgcatcacttcatttgagtggattcaacatagtactgagcatgaggcaaattcaagttttgctttttggaactttgtggatttttttttctggaatatttttgatgcgagattagttaaatttacggatgtggaacccacagatacagagggctgactgtacatctttttcaatccccatgctcctttagtatgttattctcacatctattataacatttaccatacttatctgcctttaaataaattatgtaaataactctccttgtcctttagattttgagcttctcatcagaagccaccaattatttatttctccatacgcctcgtagactttacaccttgtagaaactcactaaatggaatgatgctttaggtacctgtgcaggcagagatttttatgttttattcactgatctatcccaagggcctgcttggcacataatagactttcattaagtatttgttgttgactgagttccttgttactgttccctttggaggagaaaaagaaacatgagttttagcagtcttcaatgtaccttgatgatgacaaaatagtttatccattagtgaacagtaagcagttcctgatgacttatatgcagaacatactagaatttctctgactgagattcagaacttcccttgcctggagcattgtttttgtagatacaatggttacactggtgaccctcacattttgagaggggtagtcttttggatctcctggaaattatggttcctttcaccagctaatttctagtggccagtagtcattattggttgatcatcagatgccacaagtagcaagctctcttgaaggtttttgtaaccacttggaaagctttcaatcacagggacttggaggggtgatcatgtgtggcccaggatcgtatacatcataatcatatgggatgtctgctaaagattcaaccttggggattgaaagcagaccagctgaataaaaatggggacagggtctgtcaatctgcattctaaacactgtaccttagatagtacttctgcttgctaaattttaagatccaacatttcagaaggaaggagggggagagagagagggagggagggagggagagggagggggagagagagagagagagagagagagagagagagagagatacctggctcggtggctcacgcctgtaatcccagcactttgggaggccaaggtgggcgaatcacgagatcgagaccatcctggctaacacagtgaaaccccgtctctaccaaaaatacaaaaaaattagccaggcgtggtggtgggcacctgtagtcccagctactcgggaggctgaggcaggagaatggcgtgaacccaggaggcagagcttgcagtgagccgagatcgcaccactgcactccagcctgggtgacagagcgagactctgtctcaaaaaaaaagaaaggagagagaagaaagaaaggaaggaaggaaggaagaaagaaagagaaagagaaagaaagaaagaaagaaagaaagaaagaaagaaagaaagaaagaaagaaagaaagaaaaagaaagaaagaaagaaagaaagaaagaaagaaagaaagaaagaaagaaagaaagaaaaagaaagaaagaaaggaacatttatttttttctgagttagattaatagcatggattggcaaggagtacattatctcaggtcattctctctggtaagatgagtcgtattcaacttgagatgtttctcaggctttgcaaagggtggagtgctctttcccactgaaatataaacacaatagagcaagaactcagatgtccgctggaaaattaagttgaaaccgcttccattaaatgtatcatgctatatctaaatatatatatatatatatatatatatatatatatatatggaaaatatggttaacaatgttcacagggtactataaaaacagaaagtgttatctcaaatatacgcagttcttaactttttttgtttttctcttgagttctatcagggagctgactatcaaaaacagaccatatttttgcatgggtataatgctatgtttaggggttacatttctgagcaagtaatcatgtatattatttatataaacagcaggatgtcaaaaaagcaaagacaacatagtctagaactgctgtctaagtgcaaaatagttttattttcgtgaacagtctaaaaaatggacagagttggttttgcccatccgttaggggacattttataaaggtcttctataaataagtaaatttcaaaaatcatacaactaatactttttcatgaatttaatgtaaagtagtacattaggttaagaaaacaaaattaataatcactctgtttgtcagaagtttagaaattcctgtggtagcaaaaccctcgagccaggtgacccacacacaatctcttctatttccaaccattccactggtagtttacttgctagttacgtttttttaagttcctgaattgtgtcaggcagggttctaagtgctggggatgaaaagatgaataagcaggacaagacgctgcctttgtgggtttacgtctttgtgaaaatccacaggagctggaccagtacttgtaagggaatttctaaacaagcctgattctactcggtgtcaagattagaatagatgggtgtagtaggacagtttggccaattagacttgaggtcttctctaggcttcactgtttccccacctcttaaagctggggcttcaattacatttttctttaaaaaaaaaaattgttcttttagaaaaattaaactaccaatactgatttttgccagtagatggcagacaactgcatttgtgtgtccaatgagcgggtcaagtttttaaaggttcaaaatgcacctcttgatgtgaaaaaaaaatgttgttactttcatatgagtgacagaagttgctgttatgttccgtggactgtatgttttaaatatgaccattcttttactccttggcatttggttttcaatttggctatctgctctatttatagagggcaagacggattttttttttcttttgagacggagtatcactctatcatcaggctggagtgtagtgccgcgatctcagctcactgcaatcactgcaacctccgcctcccgggttgaagtgattctcctgcctcagcctcccgagtagctgggactacaggcacctgccaccatgtctggctaatttttgtatttttagttgagaaggggtttcaccatgttggccaggctgatctcgaactcctgacctcatgatctactcgcctaggcctcccaaagtgctgggattacaggcgtgagccaccgtgcctggctgaagttcttttgaaggtcacatgtattttgtaaattaacagagactcccttggtattttgactagtgttctgtttatgtgaaaaagttcaaataggctttgcaaaatgagatagagatgaatgccctggtggctccaggaagtatgcagttttttcaaatatgcgagaaacaaacgctttattttccagtgatgacagaagaaacaaagaaatttgatactctcagcctgactccttcccttgatccaccatcagctataggagtccaaagaaaatgaactatgaaccaaagttaaatccaacaagtcacatgcacagaacaagattaacatcaccattaacatcgccattactgaagcgaaagctggcccaaaccccactactgagtagcccatcctcattccagcaaagaaataactaactcagtaagtcttttggaagactcagggtcagggtgccatattgtatgttttccaagtccaaaccagactaagctataaagaagtaatgcccactgaccctttacatttctgcaaagcctctctcaattacagatgcttttattgacttccaaggtagcttggccaagatcattataaggcagctaggttcaggaggggataaaaaaattgtgtagcaaagtcttgaccctagatgtgtgtttataatctacaaatatgttaacttgtaaaatagagttgtctgagccaagttgttcttgggaatcagagggtgaagaagccaaatctttttggagagataccaggcatttcttcttttaagggatttcacttgagagatactttaaaggaccagtaaggtctaaatagagaagaagatccaggcaaaactaaccttacaagtgaaaaacttcctgctgttttctttttttgttgttgtctctatcaagaactttctgcctcagagcctttacacttactattatatctgtttgaaatgatctttttccagaagtctatatagcttgctttttcacttctgttagagctgtcctcaaatgccatccgatcaggctgcgttttgtgatcacttcctctaagtggcatgcgtcactttcatcattcaccatcttctgaatctgctgtccttttcttcatagcatctgtcactgcctgacaaaatatatatttattttttcactcactgtctgttaacgcccactacaatatgagctctatgagaccaatgactataaatatatatatatagagagagagagagagagagagagcgctaaatttccagtttctagaacgctatctgtctcaggagggtgggctcttaatatatgctagcagaatgaatgctcaatcccacttttatttttcttattgcagaaaggaaaactgacaaacccacccttatattatttccctccagggctttttcttttgcatatttatattgaaatcaccattaatgctgtcactcacaataaattatagcgtggtacacctgaagaacaatgaactaaattagcacattcgatcagatttccatgaatatgcccagctttgtttccattaatgttatttttctattagaagtagatgagagagaaccaacttgttagtttctaattaaaaaaaattaatgtaaatgctcattgacttaattatgagcatatacattaaaaaggaagtaaagaaattccttatgaccataaagtggaagaggaagatggagaagggcttttctgaatttggaattctaaagcataccttaggaaatctgcaactgagtacctacaaggtaccactatgtaaaatgtgataggcaattgatatggtttgcctgtgtctccactcaaatctcatcttgaactatatttcccataatccccatgtgtggtgagagggacctggtgggaggtaactgactcatgggggtggttacctccatgctgttctcgtaatagtgagtgagttctcacgagatctgatggttttttaagcggctttccccgacttcattctgcacgtctccttgctgctgccgtgtgaggacagacgtatttgcaatccccttatgccataattgtaagtttcctgaggcctcctcaaccctttggaattgtgagtcaattaaacctctctccttggagatcgagaccatcctagctaacacggtgaaaccccgtctctactaaaaaaatacaaaagaattagccgggcatggtggcgggcgcctttagtcccagctgctgggaaggctgaggcaggagaatagcgtgaacccgggaggcggagcttgcagtgagccaagatggcgccactgcactccagcctgggcaacagagagagactccgtcaaaaaaaaaaaaaaaaaaaaaaactctctcctttataaattacccagtcttgggtatgtccttatagcagcgtgagaacggactaatacagcaatcaagactatgttggcccaggatgctcttttaaaaaattatttctttaatagatggggtctcaatctgctgcccaggctggagtaaagtggcacaatcacggctcagtgcagcctgaccgctcagactcccaagtagttgggactacaggtgcacaacagcgtggctggctagattttttttttttttcagacatggggtctcactgtgttacccaggctggtcctaaactcctggactcaagcagtcctcccgctgcagcctcccaaaatgctaggtttataggcgtgacctactatgcccggcctccagaatgctcttgatgtgccacaagacacttcactttttacattactcggctggtctccagaatatgatttctagtttttcagttattctgaagcactttaacataactaaatattatattctgtcagatttttcacattaaaatctaagtcttcaaatattgttaaacatgcttgaagatactgtattcttttattttcttttattttttcattcatcagatatttattgagcagctgccaaggccaggatgttgccctggagttatcctcttggagcttggggcttgctgggacttaagaagaccagctaatttttattgctgttgagaagtagctttaaacatattatgatacaatacgtaatctggttttcaggatgctgatgtgggcataatggtgagaagatcaatatccctaatactgtaaattgtattctgaagttggttgtgtagaagatactcactggagacattgtttctttgcaatctaggaccacctaatccttgttgcacctgcaagtttatgaactatttggacagggcgcgggatctcagtttgcttgaattttccccatctcacgtgtctatgtgaaaacctttgggctctgaatagaatcagaaaacaatgcttacatgggtgtgacttttaagcagatatttaaaaaatttttggggctattttactaggaccacatggaagtttgtgatgaagtaaaatttgggcttgtcatgagctttagttactgatctctaaaagatagcggaatgtgcactttgggaggccgaggtgggcggatcacgaggtcaggagatcgagaccttcctggctaacatggtgaaaccccgtctctactaaaaatacaaaaaattacccgggcgtggttgcgggcgcctgtagtcccagctactctcgaggctgaggcagaagaatcacttgaactgggaggcggaggttgcagtgagcctagatcgcgccactgcactccagcctgggtgacagagcgagactccgtctcaacaaaaacaaacaaaaaaaagatagcagaatgcttgggcttggtaaccaggaattcagtgaatacagaatttcttaaaacaaaatctatgctctggatactagagcagtctcgatttaaagttatctagtgttctttctttactatcattttaagaagcattttagtgtatggtattgagatgtctgctaccaatttttaaaatggttttcagtcatgtagtgctctcatgctcccagaactgagagattcttctaaatttttatcaatttacagtccacagttctccaaccataatttttcctcttaagttttccttcaatccagtgtttctcaatgggatttttctcattattaccccactaaggggccttcttctcctaagcagctttccgcctcatgaaattttaataccatacatatactttatatatatactttagatactgtgtgtcttttttagaatgtggccgcctagagagtcagaaaccattgcaaaatccaaaatgtttttcaccctctaagaacccattttcaaggcctagagggctgataccatctctgtaaaatgcacacatcagtcatttcccagggcagaagacacatcctggtgtcagggtgttctggccacggcgagacagcagtgatctcacggtctgtcacatctcatagtcttttacctcccgtatggattcctctctggaggggttctgccccgtgcctttggcatgcagtgtcccttctacacccccttcctccagcaccatctttctgttaagatccgctgacccctctggacctagctcctgcattgactcatccgctttctctaaaggatttccattaagacttctaccacactgccccttcatgcttagtttccaagcggttgaaaagatcaatatatttttctgaggcaaaataagaaattctgagcacgatttcatttatcttccagcttctcactgtttttttcagcctcactgctgtgggcgtccttaaatgtgctttgttccaactgggaaacctgcctcttttcaccactgaagtatggttgagacaaagcactgcctagatatgttcactctattttgtttttaaatatgatttacacagttgttgcattcctgtgtcactaacgagtttttaagcttttgtaatgctttagtgttggctcacacaatcattaggtttgaagaaggaaggaaagggaagaaataaaatgtattgaactctcctatgggacagaaacagtggcaggtgacttcacttttagagattcaaaaatgacttgtggggcctgcaacatgtcaggattttgcttggcctcctgtctgggttaggtggcctggatctgtgctcttaaagcattgtgcctttcacttttaaaatgttttgttttacttaacatgtagcttatttgggcagcaaacataagtaagttagatacagtttctaactggcagacctacacgaaagaaaaacaaataagaaataagttgtggaccgggcgtggtggctcatgcctgtaatcccagcactttgggaggccgaggtgggtggatcatgaggtcaggagttcaagaccagcctggccaacatggtgaaaccccatctttactaaaaatacaaaaattagctgggcctggtggcatgcacatacaatcccagctactcaggaggctgaggcaggacaatcgcttgaacccgggaggcagaggttgcagtgagccaagatcgccccattgcagtccagcctgggcgacagagcctctgtctcaaaaaaaaaaaaaaaaaaaaaaaaaaaaaagctgggattggactctaattgttattttttacatttaatattaattttatgtcatttggaaagtaacgtaattctcaaggcttgtgataaaataatagcagtcctcagtgcacgatccccaatttctactcctgagaggcaaccacattcagattcttaggctgttttttctgttatttactttcatatttctaaatagcaggcatagactactgtgttttgctttttggcttttagaagttatttcctactctagaaaattttagccctcttataaatctctttctttatacttccaagataatcatataaaaattttggttatattaatatttaatattaatatgttttgactgtatattactgctgaattacttagtgaactatgatattatctttttgtattattttttggttttattgaattaatacttacttgtctcaggtcctccctccctccttcccactctttttctcccctttctttttcttttttttttgtcgttctccttcattttctctcttccttcctctctcactttctcacccttctttcctcccttcctttcttcttccttccttcctccctccctccctcttttcctccaggagtcatctatccttctgttccagtcagcactggttcctccagtcagcactgttcctctccaggcctgccgtatagcgatagtcttggggtttccttcactctactcatccccccgccaccattgtcccttttctccagagttcctcagtctcattatttgtggagtaagaacaattgttcaggtacgtgcctctgctggttatcaggaagatgaaatgagtatatgtgtgcacaaataactcagaacatagcaagcactcccaaaacagtctcactgctgcagtatatcctgctttttttgctgtgaatatttttcttatcttgtctcgtaggaatggttttataggataaatgagtagaataagagattgctgtagaacatgttaagagcttcattggtaattatataatcataattattagattattattaatggtccaccagaacacagacttatttcaagataaatcagactttgggaggtcgaggcgggcagattacgaggtcaagagatggagaccagcctggccaacatggtgaaacccgtctctactaaaaatacaaaaattagctgggcatggtggcgcacatctataatcccagctactcgggaggctgaggcaagagaattgcttgaacccgggaggtggaggttacagtgagccgagatcccgtcactccattccagcctggtgacagagcgagactccatgtcaaaaaacaaaaacaaaaatgaaaaaaaaaagataaatcagagcagatatcagctcaaagagagaaggatgctccctttaagtctaaccaagccttactggtttccactgctgttcacaccttccaccctttggcccaacaaggcaagctccttttccatgaaggtgggaagtgaatcataatctggattcaaatcatgtattggtgccatttatttatttatttatttattgagaccgagtctcactctgtcgcccaggctggagtgcagtggtgggatcttagctcgctgcaacctctgcctcccggattcatgagattctcctgcctcagcctcccacgtagctgggattacaggcacccgccattccacccggctaattttgtatttttgtagagatgaggtttctccatgttggccaggctggtcttgaactcctgacatcaagtgttctgaccccctcagcctcctaaattgctgggattacaggcgtgagccaccacacctggccaccttttagtagggttctacattttgtgagctacaatcaatgttattttggacaaaactatgggacacaaaataatgagtggctatgtggaaacgaagaactcacttatctggattatttagttaattaattaaatggaaaggctcaagatcagatggatttagatgtttttgaaaagttagcatagttctgcggtgtggagaaagttagcatagttctgcagtgtagttctgcggtgtgcacatatgtgcacgtttttttaaacaaacagctaaatgtcagtttgtttttcattgtgattgtaaatgttcgctttggttttaaaaatcagattgatgatataattttaaatcatttgtaagatatcgaaataacacaaacccaagcatgaggtgtttgttgaagagaaaccagggttcctgatggaaagaatttgagttttagacttcgctaggcccttgtcgtttgtaaagcttccgtggtggttttatgagcaatttctgtattgccagtagaagcaggtgccgtctctccagctaaaaatctaaatgtgtttgtgtctgaatgttggggctctggcgtgccttgtaagtgttctgcttttttgtttcatctgctcctttgctatctttctattcacaattaatttggtattgaacacatatgctttgataacaggtaactgcttgtctttgacataaatgaaaagaataattctacactgagtgacacaaatggcctacttaaaaaaaagttgttaatctcttcctcagtttggtttcaataaacctaagtaattttgaatattcatttaggttgtgtctacctaaggcacatgtttacagcagtttgatattatttggaacaaaccatcctccagccttttcaatttgtctgcgctgtgtgacattaaacaaatatcagcctctcacttgtgtttgtctcaaagcaggtagtagaaaagctggaacagaacaaaatattttcaatcgggtaatgtacactttgaaaagctagtctagcataggcagcatgccagatttcatatactgccttccattaaattcagctgagattaaggaggatcgattcaatggagagtgtagaaattgaatatgcattttatgcaaagcgtgctggtcagtttcttaggagcttctggccttaaggaacacgtggtgagtagtgagattctagtttgtgaaaaaccacagtttgactctttgatacagaataatttattggtaaaaataccaatattagcatttacaaaaatttttgtttgcttactctgtgtattctaagtacttctcttgtaatatttcatttaatcctaaaataatattaaggagttaatatttaatgtatgagtttcatagatgagtataatgtttaatagctgaatataatgaactgcaaacaggttaaataatttgtccaaagcagctttcaaacaaatgcatgtctgattctcactctggtttcagtttctggagtaaagtaacaaacaaatcacatagacaaaatacaaagcaaaaaaagtctaagtttttttatacatgatacttaaaaatattccaacctggtgcggtggctcatgccagcactttgggaggccaaggcaggaggatcacctgaggtcaggagtttgagaccagcctggccaacatggtgaaactccgtctctactaaaaatgcaaaaattagccaggcatggtggcacgtgcctgtaatctcagctactcgggaggctgaggcaggagaattgcttgagcccaggggacggaggttgcagtgagctgagactgtgccactgtgctccagcctggccgacagagcaagaatctgtctgaaaataaataaataaatattccttcttctctgttatataagaactcattaaattaagataaattaagtccagaataaaatatgaaaataggaaaataaagggaacttgaggaaaatataaagttgtaaacaaagaagaaactcacattcagatagggaaaaatttaacatagctaaaggtgtatttgtttgttcattagtatattgctgtggctcaaccaagataataaattttaattagcaaatgaagctagagcaagaaggatatgtggctgtttaaataagaactggagaggagaaaaacatttttcagtgtagtcttctaacacaattctaatcatatgtcacttcattcatccaagtagtatcatctaggcactgaggataatgttctctatgcaacttggatgctgatttagtggtcttatgtaaataatgcattgttggtataaaatatgacaggcagaagtgcttaattttaatgtttgccatagattttcttactcggtaaaaattaaggaagaaaagcagaccctgaatatacacatggtagcaggacgctgctatggggcctaccttctttgattattcactgttcagagaaataaaagaggctcttcagaaacagaattaagtatcgtggggaagccaaatttgatctggatttcaaaatctattttaaagaaataaaatcttagagaccatgcttcataagattttccagtggtcataggttgatttttattaaataaaagttttgttttttggactactttttatcaggtttgatcactgattttctcctaacgtttagattcaaacaaatgaccatatactatcgatacaggaactaaccacgggcatatgcagtaaaggatttcaaacccgcccttgattgaaagagagatttttctctacagaacaataatactactctcggtggtaaagagtacaacttctgacagatattttatccgttttctcttgagtattacggtttggaagaataatattcagtattatgaacaagaatgaaatatacttttatcttctttccaatgaaaacatactggtctggattaatgacaggtatcagtagcaattgtgaattgttttcttctttttgctgccaattaatattttctttcttttcagaaaatgatttcaagaaccactaatgtttatgtcaagaggaaaaggtttaagttaaagaagtgtcaggtttaacaaggaatatgctccacatattctatgactggaaggctaggagactttctggaagggtttatatatgtttcttctctccagtagattagaaagacatataatttggaagcccagatgcctgccagccagtaagctacctcaaccctctcaataagtatgaggatggatagaaaaggaagataaactaccaaggtaacaggtaacaccatagttggtgaggatggaagtgggaaaaacagtagggaggaacatgatagcaaagatggcctgtcagtttcatggactgagtatttaacaaggggatgaactataatgtcttgagagttttgggatccatttgtaggatggaaaaaaaggcctgaaaaatgacagcatcccctggtatcagaggccactgaacaacagactgagtaggtgattttgcagtcagccttaccatctgcttctgagttgagtgaaggaagatgcatgtgaacttttcatcatccttctaagatgtgaagaaaacaatttcagctgtgaatatgcgttgctcacacatgctgttttcaaaaggaaaaatgtgtgaatggagaaaaattttatgaaatgaaattcatagacttcatggtagcataagaatatactacagtatattttagaacaagtggtctgcacttctgggtaaattctgagcttgttccatttggttgtctaaagagttatttctacatgcccttctgaatcaccagatctgcaggacagaattacatctttagtttcagtagattgtcatagaagctgaggaacggttaacttcgttatgaacaataaatcataagtgtgtggtgaaatgtttattttcctagacagtcaccataaattatgttttaaagccaatatgtcagattgagaaaataggtaagattaatttgtttttttttttttttttgctttttctcttaattttgcacctacatatgtatacggatttagagtatgattaggtgttcagattattcttaactatttaaagacatctctttcaagtattcttaatttaaaattttagaaattaacaagaaattaattctgagttacataggtttccctcttaactaaagacaatttgaaaagcagcaaatctttagccctggacaaatgcaagcaacgaaagaaaaaataatccaggttatgaaactttttgtgactatttgacagcagataatcagttctaacagatttttttccttgtcaatggaatttcttatttaccgtcactaaacatttgcttctgaattaaaaactgtgtgataggttgctatgtcttgataagaaagctaagtttcagatcgcttagactgtagtgccgggtcttttaactccatgtttcgtaaatgtttgctaaaatgtatatacatttagaagctgaagcaaaaatgctacattcacttgccgcagtagcagggcagcgggccaggcagatgtgcagatgagccccctgggagaggactacagtcagatagcatgtggccttctgaagacccagcactgctaaaactgagcctgtcttaaaaataccagaaagaatgctgacattctgctggcagctcatctgtgtttttaagagctgcttaaaatcaagatcaagtttttaacataacttttagcagtgcttagatgttgctttgtgtgtgtgtgtgtgtgtgtatctttaaaaaatattgcatgggcaaaccaaagatttctgaggttcagatctatctagaaaacagtcatttttcagtttctacattaagggaccaacatctgtgtatgtggtatgtgtatgtgatactgtgcatgcaaagtttcccatttcttggactataacctatatcttagaagcattttgtaattttaagtctatcaatattcatgttttggggagaaatttttttaatagttttctttttcacttctagcaaacatttaaaagattttaattattaacaacacaacacagttctttaaagtctgtttgcttcttagaaaatcaaaggaactaaacatttcaatgcattctctttgccctcaaagtgtttcttggaaaaaatttctgttgctattgatattgcagtgggacaaagtataactccagggaagggaaacagtgcccaggataatcagtcatttgaatggttggttccctcatctctgcttcacaggacactaatgcagcagcagatggcaagccattcttggtgacctcattctttgaacaggatgagggcccactttgaggaaagacaaaatctagtgtggagtaagcatgagtgtgtcatttgaaatagacatttaaagacctggaggatttcagatatccctgtttctagatgaggatgtgctgagacgccctggtagaacacatttgggagtaaggaaagggacagatcccagttcgtctgaaacatagggttaaagtaggagggaaggaagtcaaaggcaatactaatagccacattctagtctaagggttctcgtattgcttatctccatatatgtttctttgtgaaggcagaaacatctattccttttttttctatcattcatgctattgtctcaatgaaatttgctgatttgacttgatctgactttagatgtccagctatcaagagggtttttataagtacagtctatttattatagtcgttttattactaacaggccgacccagcctttttttttttttttttaaacagattaacctttttggaagagtcacagtgaatgtgttacagttttcttatctttaatcatgtgtagatataacttgtcttgacatttggatttttcttttggtttgtgacaatatgtacaattggatctaagatttgatgtcaggaagtcacaagggaagaacatataaggtgctttagttcatcttcctgttatttttagggataatagataaaagagggctcagaccgtgtatgagcaaagctctcagacttgggaattctgtggtccatttgtctatatattccagcattcagtaaaatgaaatggtaacaatgcccacaagtacctgtcaggacatgaatgcgaaacaatgtatcatacataaagatcaaaatgaaaataccttcagccttttccctgtacatttcaccattcttcatgggcttataagagcttctcgagggaaccatcaaactgaacaagcacaactgtgtggtgccaatataaaacaattttatttacacctttctctcattgtccctttatgttatttcaatgagactgatcgtttccctgcccctgtctgaaaattcggcagtccgctgactgtctggtcttcctatcatacaaacagactctatttagtaattaggctaattagcccgcataacgatggtttaagacaaggtcttccttccctagctcaggcctgtttagaagctgggcctgtagtttgaggagtagagtaagaaggcttctctttttggagacttgagctctctcattgaaccccatctggtttagtggtcgcttttcatcacccaaagcactctctttacttacttctgtcttcacactcacctgctttattgtactcaactgtttctcctccttatttacaaggatttcatgttttcttcatccttgctctctcagccgcatggtagtgagcacagagttgtaggcaccagagagcgtacgctgaatgaatagacttatcgctggagttctcataccccttgcagagtgtctgagaaagtcggattccctgattccacctaggaaatttggattcagtagatttggaaagttccacaaggaggtcctgattcacagcaggggtgagaaccactgagctagatgttccttgagtttttgcaaacttaagagtgtcaatagtctctaattaaggaacattatattttgacctaaatatgtatttcataataagaaagagtagggggtttctccagtttttgctcattctgggtaagattattaaaaataccctctatcttttatgatagataggtattgatttcagtataaatcctttgggagaactatgcctgctttcccagttattctgttttaataagttttatgctgatggttagaagtttaaatgtatcttttacctcagtatatttttatttttaaggaaagaaaagaaaatgaaacttctataaatataccataatattaaaacaatgaaaccacagcactgtgatgtaaattattccgtctcacatttaacctgtaggtgtgctggtcatttcataacttatcaaatctcttacaagtgattctccttaagaaattttgtttttgagggagaaaaaggcaaaaagaggctataaagattgcataagacctttaaaatagatggtttactaagtacacgtattattttaaaaagaggaaataaacaatgatatatccaaatttaatattttttaagggttgacccaacctttctttcattattcaacagatatttattgtgcatttaaaaggcataccatacattggtttgtcataaaatgacacagttctgccgtatgttcacaatgcttgttaaaaaattctttctgattttagcactttttaactttcaagttgagtaagcaggtatcttggaaacatggcatcattattgataagtagtggcctcatatacccattttattttttgattcccttgtatgaaatgccacagtgctttcagctctttatatagaggcactgacctttccattagagtaagatgacttggaagtatgaatgtggctttgtttttataaggtttactgtgttttttgttaataaatatttatcacataattacacttaaacattaaatccccctttaaaatgccctgcacctgatgtttgtttttaaaactatatttatgtgctgatttatatatgttgtgtatgtgtggcttactgtttttaaaaataacttctttgctctctaaagatattaactgatctatcattcttaaattgacctttattacatggtttaggaaatcaggtgttcttaaccttttactcagatattccaaccatcagggtgaagcttacgctgtggaatgcttcatctctactgtattcctcatctctctatttctctatattaggctagttttacagtctttactcctcgttgccaaaccacaccatactgatgccagatttttttttttactaggctaaataatatgcttaattcttttcttttcacttgttaagaatgcaggttgtaatttattttacactgtagaatgtgcaaaattcaataattgtaaggctctcagatgcaattatgctctttagatgatgtcaccataaagctataacacagataacattacaggaaaatgagggccatgggacctgttagctgagagataataaatgatgcaagagacagcttacctattatggcaagaaaaagggaaagtttatctttcttttatattttaccgaatgcttttacttcatgcaataacaggcagtaatttcaataatactaccataaagaagccttgagattccaatatttgagcataggctacattttttctgttgcagactttagctgagggttgagagttttattttgtgcagtaacttaatgtcttaggtcattaaatcctgaaagtagcttacctagtttatatatttagggagtttctgggacatcaataaataatccttccttttattttttgtctttttttctagtttaccttgtttcctcagaacaaacattgggaaaatatgaattgcagttttattatgttgaacctcccattttcatgtttaaaagacaatcttatgcaattaagaagacaaagttgtccaagcgcggtggctcatgcctgtaatcccagcactttgggaggctgaggcaggcggatcatgaggtcaggagatagagaccaccctggctaacacagttaaaccccatctctactaaaaatacaaaaaattagccaggcatggtggcgtgtgcctgtagtcccagctactcaggaggctgaggcaggagaatcacttgaacccaggaggcagaggtttcagtgagcagagatggcaccactgcactccagcctgggtgacaagagtgagactctatcttaaaaaaaacaaaaacaaaaacaaaaaacagtttttataaagatcataacttgtttatgaaaatacactttgacaagaagaaaacccattaacacatgagagcaatggtcggatagaacaagtcactggggagatagttttgcagggaaggaaataaaagaatgataggagagggcgggcttcaaagatcctaagttctgagtgccagttttatttgatctggtccaagtttcatgaaatttctttgatcttttccttcttatctgtcagttggagatatcactgtcacagggctgtagccaggactcaatgaactacagcatgtcagaagcatgtgcacagtgcctgtacctagggaatctcaggaaaagattgaaattccaaagaaattttatcttcttccgcattttttcttgatctcttttagaacatgcattaaaaaatatgtacagcaggtgtgcaatgatgatcctcatatttttgcatttaaaagaaaatcatatgcaattaagaagtgaaactttttgtgatgcatgataacttatttgtggaactcttggactgtaataaaaactctttaccacatacactcaaaggccacctggattccatttatccaaaggtgtctattaaccacttactgtgtctagcacagcactatggaggaggatggaggcgggaatgcagaaaatatacaatatcagactgcagctttggagcagtattttgggaaaccaggacattaaatgaaacaatttaaataacaaccatgcattatatatttgagtggaattttattgcaaaaccatgttactaaaatttaggagtcagaaaagattctaaggtaggattaaattagtaatttataaaaagcctcaatcagagtgactggtacagagtagaagcccagtaaatagtaggttttttaaagaaatacatattattatcatattttttctaagaaataggaaaacattaaagaagaaagtctttgaaaaagcaagccaacccagcactttgtggggccgaggcgggtggatcacgaggtcaggagatcgagaccatcctggctaacacggtgaaaccccatctctacttgaaatacaaaaaattagccaggcatggtggcgggcacttgtagtcccagctactcgggaggctgaggcaggagaatggcgtgaacccaggaggtggagcttgcagtgagccgagattgcgccactgcactccagcctgggcaacagagcgagactctgtctcaaaaaaaaaaaaaaaaagaaaaaaaaaagtcaagccaaatgcctctttctttgtggagctttattgaatatccagaggctattcttttagttgcgcaatgtgcttccatagatttcggccacacatctgttagtgctcctaacatacgacacggcaatgagtggtgtatcctcctgggtagaacaggcattcctcagggagctgctaagattctatgtggccgtgtaatccttgtcccaaacacagggtctagaacataatcattcattaatgaatatttattgaattaaataatgggttttgagctaggcttggaaattaatattagatctgcatttgtggtgggggtgggagggtgtgaggtcacctcaggaatgggaacaaccttgtggaaactgaaatggacatgacattttgttcattcattcaacaaacacttgaatgtgccaaacacttgagtaaaagcagatgtagcttcttcctctgggacttacaaactagtgggagaaatcaactttcatcaaatataacagtaaatacacatttgtaactgataaattctacaaaagagagggctatggtgctctgagacagtctgacttggtcacagaagacagaatatatgtgaaattagtggagagcatttctgtgaaaagaagtagtgtgtacagactccactcaatggcctaaaagaaggctgtggggatggaggggtacagtgctgggatgttaggctgaagaagcaagtaggggtcagatcatgtagggctctttaagccacatccaggagtgctgactttcttgtaagaataatccaaaccattgagcaaccctaagtcctaaagactggtgtaggggttcagcaatcatcaaatgttcccattggcattttgcaaagctcatgctgggtgcagagtgggtaatgcatgggggcacagccagagtggattctggcggagtgattgacaggcttctgcaaccatgcagttgagagatgatagaagcttggatgcaagtgtagtgacagaaacagagaagatggacacagtggttcacacaaaaaatgacaacttcactacaagtgatttagcagtgataagaattaacattgaataggaaatattggggttaagcagtgcaggactcagtctgttgggccacatagatcaaacccaatacctatgctcattgacatctcttcctttacctgcgttttccctttaattcatttactcactcaatcatttattcattgaatcactcattcattcactcggtatttactgaggtcctactatgtgccaagctttatatcaagtactcctgcaaatctcaattttcctttcttctgtcttaatttatcctagcttttcttaccaaagtaaaaaaaaaaacttcttccaagagcccttcactggtcttcccagttatgcataagcagccttcactcatcctttccccatttgaaacggcacaacactcatgcattaagttatttgacttcatctgtaggtgttaaatcaacaacttccttttgacacttggttcctcacttaaccagagacccacaaaataaaggcacgtggtaaacgattgtttcactgagcgaaactaaattaaagaatacacaggcaggaaacttcacaaaacagaattaaattatctctaaatgatcatcaggttctgatgatgcccctggatttctttattattactagttttgataaatgatttatttttcatgtagaattgtaaaacgctccattccttgtcattgtgtcgtttcagaaatctctggtaatttagttaacctaaccttccctgtgacatatgggtctcttataaaagccgttcagtgttctgctgaagccagctcataccagctcaggagagccagttgttcacatcttttttttccagtaaggctatttttttatttttattttttattgtgcttaaattttagggtacatgtgcacaacgtgcaggttagttacatatgtatacacgtgccatgttggtgtgctgcacccattaactcgtcatttaacattaggtatatctcctaatgctatccctcccccctcccccctcccccctccccccaccccacaacaggcccggtaagtcaggaaacaacaggtgctggagaggatgtggagaaataggaacacttttacactgttcgtgggactgtaaactagttcaaccattgtggaagtcagtgtggcgattcacagctttttctagctcctaactcaatgatttactttagtagcttgaaattggcaatgttgggagtatttttcaccatggaaattggcaaatgctacaaatcaaggctttgacgttttcctctgggaagccagtcatgaatgactttctagcacgccattgcttcgaactcaccccgcaaaaaaaaaaaaaaaaagaaagaaaaaatccaaaccaaaccaaaacaaaattaagatgagtgggttcaatgtattcttaaacatgagtgtgtgagcatatgtgtgtgcaggttgaagtgacagagagctatttgttagacctatgaaaaaaagtggaattctgttattctcatcttcattttgggcttcattcattcaggcactcattcaaccaacacacttactggttcatatatcaggcaatagtttcttttctcaaattggacacaatctagttagtgagagacaacaacagaaattcctatacaacataatgagcatggattctgaactgaagtacaggccatattaatggagagggggaaacacatttaagaattatgtaggaagtaaaacaagcttatttgagaacaggtgaaagagaggaattggagataattggcaattttctagaatgtgcaggtgggtggatggttgtctgttctctaaatacaggctgagaaatgggttgaagggaggggtgggtggagcaggcagaggtgagtgaaggaggtgggctccatttgagacatgttaatttgaagttattttggaatctttagcaggcagtttgcaatacgtgtgtgaaaattggaaaaagattgggtgatagtgatttaaagtcattttcctgtggtagtaattaaagctgagtgagaataagagggagtgttagtcaggatcccagcaggaagcagatgtcacactcaaatgggataattaaggagaatttgatgacaagactatatataaaggttgtgggcaggattcagaaaaccaactgagatgatgaaacacaccaggactagcaaccacagacagccatgacctctcctaggcctggagggttgaacggaaggagcatttacaacgtagagatgcaggagctaaatctgtgagtgtggtggtaggagagggttggccgtgggaccttagcctcagtagaggaacttagccactgccaacccagagcctagcagggaaggagcctggggaatatacatgctgacctccctctcttgccaccatcttattttcttcccccagttggccaaatccatcatgaagccaaagggcaaggaaacacctggaggcttcatagaggtcatcctcctggggcccagggcagggtcaagaagggtggatggtggaatagtgaccttggcatggcaagtggaaaataaccaatgagatgatgatcagaggagactgagacaagatggaacctcaagaagcacccacatttaagagacaagcagatggaggatcctgagaagtgacacccaaaaggattagatgagggagtggttttgctgaaagaaaaggcagtgttctaagtaagaggaaacattgtcacatatgcaggatcaaagtacaataataagagtccaaagaattcccagcaaagtagccatttatagtcctggctgactattatttgcacacatgaggttatgaaattgacagaagccacaggaacgagtttgcaaacctcggtgtcattgtttttgcatctaacaggaagataggggtagaaagtttgccgtcctatatagtagactccttctcactgcctgtacctcctgttccatctttgaccctgattctacaagcacgtgctcgaaagagaagagacaggtcattgtcaacttcaagccaccatgacattatccaaggaagggaggcagtgacaatggttaaagaagtagcctgctcctttctgcagctcccttagggtctgacagtagcagatgcaagagcaagagtttggtattctccatttcagatacagtggtggattattttacataaaggattagcaacagtggtcttggtctggtgcagttgagtagatatttcagagtgcaaaatatggcctggctgtgaattgacaaggagtcaggaatcatagcctaggagatactttacaggacaaagatgcagtctttgtatttaataggaaatgtcaggggaacaaccctatggagtatgaatgaaatgcatatagcacagggaacattacatagcacacattccatacatgtttgttgaataaaacggaatttttaaaagatgcagtaacatttagtcataagaatacttgacagagaaaattttttcatcgtgtactgtttgacaccttaccaaaagattagtaaaatattttccctgttttagtttgttttttcccatacaaaatacaacttcattaaccaaacaactacagcaaaatttataatatgccagcataactctatttatcacattgatacacttattttgcagactttaaatatttatgtgtattttaaaaatatattgtctgtataattttatatagtgtttccttgtcagctttttagcataagcgttctccatattactttctaatcatttttagtggctgaataagagcctgtgcagaagatgcaaggtgatcttcttagctgtttctgagtatttatgtggattcatgtttttcacttttagaaatatacacatgagggcattgtacccagaatttttccccactgagttttgagttatttccttgggaaatttctggctttcttgaaatcaaattactaggttgaagaacaaaagcattatgatgaatcttgatgcaatttaagtacatttgatattacaaattcttaaacttgcttttgagtaaatacacttgcattttctttagctttttgcatgtctaacaactcttttgcctgtgaaaatctagtaatttttatttttccgcctgtcaaatgaatatagtggtagctctggctgagaagaaaatgaacaaagtgacttgaaatccattatccctgagtacaaagtttaagatgacaaatactgattgaactgaattgaatctagcaagtaaggtgataatacatgattgttaagtcattatctgtgatttatttcaatctaatcgtgatttactataattctgtacttcaaacaagatcaaaaaggctagctgtgatctagtagtcataccttgtgtaacatatgctataaaaccgggatgtaattgctgttaatcagtgcttattgaatgtgtttcatagcattttcttcagcatgttccattgcagagctcatgtgtgaggcacatattttcagtgctttgctcccttacactgatgacaatgtgttgatttttcatgtcgggtatttttatttggttagtctgattgcattttgcttctctttacatttaattattttctcccttctgttagtatattttgtccatcttctcgtagggagtttttttttttttttctcctcctctaacatctcattagtaattcatttaagttttcttaaacttcctacacatgggttctgccgtctttatgcttgttaaatttattaaagtttggattgaaattaaaggaaataaatgcccaaagtgtgtaaaaaccatttgactcagtaaataaacacccagacaatctttttttttttttttgagatgtcttgttctattgcccaggctagagtgcagtggcacaatctcagctcactgcaacctccacctcctgggttcaggcaattctctgcctcagcctcctgagtagctgggactacaggcgcccaccaccacacctggctaattttttgtatttttagtagagacggggtttcaccatcttggccaggatggtcttgaactcctgacctcgtgatccgccctcctcagcctcccaaagtgctgggattacaggtgtgagccaccacacccagcccccagacaatcttttaaatatttttgcactgtataaaaataggtgaaatatcgaactttacacatttttttaaaatgttcacactttgattccagattaactaaatagatgcccaaaacagatacagttttaaaaactcttgcaaatcaccgatatgcatctgtgtaaaataggtacaacatttacaagttaataggtatggtttttgtgtgaccactagatgttttttcattcattggccaatgtgattataggaaaaccatgttcagcttaatttaggaagaacactgatagagataactggctaaacagtaaacttggtagacccaattttaaaaagcagttttcatacctaaaatcacaagattttttcctcttcaagatattaagatgtgtgcacacatactagatatatatatatatacacacacacacatacacacacatatgtatgcacacatcaagatatctactccccatatatatcaagagtctgattagagtttagctttttgctttttttttttggcatttctttttgctttggaatgttgcctggtacattgatttttctataataggtgaattttgagaaaggagttttcaaagcatgaaaacagaacaatgtctaaggaaatcctagttgctttcgatattaaatgaataatataaacacattttcaacatactgatgtactatttaaaatcataatatctattacttttaatcaatattggagtttcttttaaactaatctctgtgccccatccatacattatactgtggaaccaaactcttcactgtgaatgagtggaaaggacattcaaaatccttcatattgagaagtaaaataaaattcatgtattcgcttgtttatgaaatatttataggtacctattatgccagtcaaatgctcgtgtacattaggagtaaaattaatttatttaatctatgcaaccttgtttattgtccccctaaaataaatttatgtgactcatgttaactatatagtagattttttgttctagtaatcctccacagatgttcaagtctgcttaattgtttttcatttgcaggaaaaagatttttaaaggctataaaatagcaattaaaatgcctgaggatataactacacaaggcaaataatgaaattaacaaggttcagtggttctacatgacacaattgcctttttcctaacaaggaaataaattttttctctaaaagctattatatgtggacttaagttggaacaaaaataaacccagtgttcaagctcagacacagctttttgaagacaagagctttaatttaagttccctgagatccccacctttccgatgctgtgtatttcacagtcgaagatagttaacattttgagtgtgcaaagattcatttcattcatttagtgcttattaagtgctatgaaagatacaaagaggtagcaaacagtgcttggttccctttgaagaaattaagctgaaaagggtaccttaatccttagaaaatttgaaatactaattaactaaacaaacctctagactcgaatcctaaactaatgttatttccacgttactgtatccggatacttcccctcgagactcaaggaatcttctacttaaatctgccagagcactaaaatcatagatgtaataagttgtacaaccccagtaatcccctgctgtgagtatagagtaggaaccaggctcccaggtgttcctcattccacacactctttgttcctccttccacacactctttccatcttctcatcccggaaggatgtggctatgagggtagtcgtgaagtctcgatggatcacgccaaaatggtttgtagataggagtatgtcagtgtttaagatggtttgtcatttgtggatggtgactgtcaaggggatctggataaggaagaggaagaagacaggtgagatgttcacaatctcatgtggaagtggtctatttggtgattgcctacatagtcattttataaacatttaaaaataattcctagaaacagcatgttttttgttggtaacttctcaggggcattaaatcagcaggcctgtgctcctgctgatctgtcatgatagatttggaaagtaattcatattttatattgatattgaaacatattgagtctcctcttcagtcatctgggtttcatttgtgtctaatcttacttaattagataccagtgtgctttgctgttacgtgaagagtgaatggggaaaatgctttatatgtagatgatgagcagagttgcttttgctaatttgggcttacactgaccccaggatatctcatttgtaagtgctgtgctaggatatttactttgtttactttgaaaacttagctttgacattcattatatgaaaatgtgatgtgataatcagcaagataaaggaacgtatgaaaatcaattatggtatcatttagtaaactaatttaaggagaagattgaggttttattggtacttcaaaatggaaacagaaactgtcaaatccagtcaaatccattttctatctaaggatcatattggcctgtgaaataatttgcaaatattgctttctaagccattttcacgggttcttttatttttgaatattgggcttcccaggatggtattcttgttcctctaattaattcaacaactatttattgtgttctgtcctatttttactctctgagataacacatttccagtcttgactttttcccctacaactttagctatcacttcacattgtcttcatccagctcagcgctgtgttttcaaatctttacctttatttctagctttctcctcctatccatgtttccatcaggcaccctgaatcccaaactcaaactcatgacccaaactgactgctccccaaataccacaacctacatatttttaaagaatcttatcctattctaagaataggtttatagtctcacattagatactagatttttatactaagaatctaaagaatgctattgtttatctgtggtctcagtgaatggaactcggagattctcagttgttcaatctggaaaactcccatggagcctaactccccatattttgctctaagcacctccttctaattcagccatgccacgactgtctcctaaatctcttttcttctatagcatctctattgtgttagtttaggctcgactcatttcttgactcaacatatgcaattttctttttttatttgcataggtttttggggaacaggtggtgtttggttacatgagtaagctctttagtggtgatttgtgagattttggtgcacccatcacccaagcagtatacactgaacccaatttgtagtcttttagccctcaccccctcccacccttcccccaagttcccaaagtccattgtatcattcttatgcctttgcatcctcatagcttagctcctacttatgaacgaagacatatgatgtttggttttccattcctgagttacttcacttagaatagtagtctccagttccgttcaggttgctgcgaatgccgttaatttgttccttcctatgactgagtagtattccatcgtatatacatatataccacaatttctttatccactcgttgatccatgggcatttgggctggttccatacttttgcaattgtggattttgctgctataaacatgcatgtccaggtatctttttcatatagtgacatattttcctctgggtagatactcagtagtgggattgctggatcaaatgctggttctacttttggttctttaaggaatcttcaggctgttgtccatagtggttcaacacatgcaattaattcttaatcaagcatcagtcctccagtcttttccactccttccaattcccatctcaaagctctattttaaggatcacagtctcatcagattactgccttgttggaaattcttggaaggtttccctcagttacacttttgcccttatgcctgataacttctgtactcttgtttctgaacaagtctctctctagttctgcaggcaacgtgttgtgatctcagactccatgtctttacatgtcctgtttcctctacctggaaggccctttcttgcctcctttgtttagctaattcctacaactctttcataactcaagataaacatcatcttctctgggatatttcccaagactctctctctatctatataatagcagtgttgctgtgctgccctacagtattccaagaacactgtgtgcgtgcctcctataatttaccacgtctgtttatatgataaccgtgttggtttctttatatgggtagtggctaccttgagcgcaggaactgtgtcttatttaccactctcccagtaatgggcatattcagttcaagtcaataaatatttattgagtacctactatgtactagacactaagtgctttcaatatacatcaatgagcaaaacagacaaaaatttctgcatgcatgaatttatatgctagcataattgcttggtgttgaaagagagagagatagagagggagaaggagagaaagagaagaagaaaagaaaataggagggagggattgagatgaaaatgtggaattgtaatactttgaaaggaaacaatcattggtattctggttgggaatttgaaatttccaaattatcagcttatggaaacggaagtggacctcctcgagatcgcttcccgaggtttttgtattccttgtcatgctgctaattgcttcatgccttcattataggactcagctcccagtggatttcagtattgttcccagttcctttctattaataaatgtttagtaaaatgtagcagtaaagaaaatcatatgaagttatgtaacttttcggaaattaaagaaactacttagtaatgcttaatgcttttaagagtgcaatagaaagttctcccacagctgggagcgatggctcacgcctgtaatcccagcacttcgggaggccaaggcgggcggatcacgaggtcaggagtttgagaccagcctggccaatatcatgaaaccccgtctctactaaaaatacaaaaatcagccgggtgtggtggcgggtgcctgtagtccagctactcgggaggctgaggcaggagaatggcgtgaacccgggaggcagaggttgcagtgagccgagattgcaccactgcactccagcctgggcgacagagcgagactctctctcataaaatttaaaaaaaaaaaaaaaaagaagaaaaaatcttctctcactactgccgggggatttgtacttgatgaaatcccaaggaaatactgaataaagaagtaaataaatgcctgggcttgcagttttgccttcaaatcaatatctgatgtaggctagacatttggaagttttatgtttctttttggtaagtgtccatacttaaaaaaaagtgtgcgcagtgttttctgtgctttactgaaagagtatcctagtggcaacaaattccaccgtgttaatacatattatttataagaatttgaacctttgattttcctgaaaataattttacaccattcttttttctttttgacatttccataggtgatattttgcactattgggcaaaatatttatctataaggcaatgttaggaggatcacatttctctgctctgggccacaggctgctcccccgatggtactggcaaactcaggggttgaggtggcatggaaaacgtttctttgggggctgtgctcaccattaaagtggggaagtggaaagctgacaaagtggatatatagggtattttttgaaaatagtcgtggaagacaatgtgaataatgatcgtgtgagacaagtatctttaaaatgaatatgtggatgtgaatatgtgtgtgtgcatgtgtatgctcatgggtgcgtaagagggagaggcaaaccttttagttgtatggtttagcattatagaagacagtaaggttggttatggaggctttccctgaagtcttccagcagattgtaaacatattaattaaaaaggtaccactttgggctagtcaagtcacttctgagctcccgcatctgagggatgcaagcgatttggaatttggaggccctgggatcccgttggtcctgagtgtcgcagagcagaggctgcagggctgatgctgttctcctcacagtggacagagctctatgtcctgctgctctcactggaccattaggagatgagtggtctggctgcccctacccccaagggattttcttgtgggcagcacggtgctgtgtgcagtctggagataacatagttttatgtgtccctttgaatcgccggctctgcttgttcatctgtctcaccaaccattcaggaacagccaagggatagtcacccatccttattttgattgaaagaggaaaagctttatgaatttttctcacattcattaatcatgctcagttactttttctgtatggtgcttcttgtaatttccttccctcaaatgcattagattccaagacctctaagtaattgacagctacttttctagggcaaagatattcattttagttgccatgtggggttttatctttctacttgttcttttccccagcacccttccctaaaaacctgatttaacggatgctgttactccgtcttcatggggactggtgcttttgcctatctattttctgttttaccttatcattaaggacacctccagtgaggtgatctctcgtgggattactaactccaggccaacacatgaatggctcaccagaccacactgtatctcaccatatctcacacaggaactcttaaaaaaaatgacgctacactgtttataatctagtgggtaatgaaaatttttaaacttttttttcccactaaactagttcttttgtttttgtttattccttttaagacagggagggtcacactccccagcctgagtgcagtggcaggatgatcacagctcactgcatcctccacctgctgggctcgagcagtcctcctgcctcagcctcccaagtagctaggattacacagacatgccattatatcttgctttttaaattttttgtagagacagggtcttgctacattgctcaggttggtttcaaactcctgtctaagcctcccaaagtgttgggattataggcatgagccaccacacctggccccactgaactatttcttgatgccactgttgtttcttccagaactctaaaattctgccactctctgttctctgggacacaatctgctcccctggtgtgatgagtgaactcagaattgtggtgacatggaaagcctttctttttatttttatttttattttttttgagacggagtctctctctgtcacccaggctgaagtgcaatggcacgatctcggctcactgcaatctctgcctcccgagttcaagcgattctcctatctcagcctcctgagtaactgggattacaagcatgcatcacaccctcttattgggcctgtgcacaccattgaagtggaggcagaggaaagttggcaaaatagagatgagaggccaaaaggttcaccagaacaactcaggagatctgagtctgaaatcggaaactagagaccactgataggatttcctaggtggtactaaaaggccaaactgtctaaactggatttaagacaaaaatgagaaacacttttgcatgattgttgcagatttctaaggccctattatgttcctaacactttgctcagtgggtgagtatgatcttcaccagggtaatggttgtagggaatggagggatcacatggtgaaggtcacatggaaaggaagcagcagatggaaccacagactctaaagctcagcaatgacttcttcactgttatttctctttcagccataaccatatgacattttaaagtataatgaaacatgctaatattctcacctaaattatcttacattttattatattttaagtacatttacatttatttccactatagaattttttttcttaatagttaagaaagatttactctataaaagtatagctgtagtactgggatgtaaaacgtacatcttatctagaaatcttgattttttttcatacacacacacactcaagtaaagctagcccagtgtttgatttgaagcccacatccagctgaaagtggggttacactttataaactaataaagagcaagattctgctttgacttggtaaaacattaaataggatgtgggcatatgcccactgacatctctctgctttatcttggtgtgctgaccctggtggcgttcacttctatattttactttgatacaccacagcttatcgtatgatctccttcttgtagattatcctcatgatatggagcatagtgaataccatggttactgtgagtttggcagggctattgtgcgattatttttgagatttgggaggctttcatggactacaaaaagatttaagagctctatctgttacaggagctaatgcttacctttatgaaggtgtgaatcccttgtaaagaacatcgaggctttctgataagtgtgcatctaaaaagaaggtaattctttttcagtatatactatttttcagtagtgatgtgctgctgaaacctattttgtaattctcatataacacaagcaaaaagttgcccaaatgtgcaccagtcattaaaaaatagaaaactaaatcaaggtatctcagggactctagaaacaaataatatttaatgtggaatcaaggcacagtgcaaactggtttccttcatgaacataataattcccctcctgagcagttgtgtaagttgggcctagcttcatatccaatttcttaaatagttgcagcagcatcttctcttggcatacttagtgtgaaaatctgcaggctcagatcagttagtggcagaaactgaaaaggcacactgtgctttgggttggccagagattcctctgaaggtctttgaatattggtcagtaaaaatactttgaaacatggtccttaggtttgtatccgattagaacccctggaatatcccaggtggtcatgtcaagatagtaaccatctcctgacacctaaatctgaatcgctctgctgacaattatagtaataacactatcatatcatagcttttatatttagttactcatgggaaaatgtgaatgcaattggggggaaataagtaatattggaattcgtgatatttcctgcggacagtaacaatgaggggctggagtcagggctttggactgctagtggacaataccaggacaatggacacgtggaactagataagaacaatgagaggagaattgaaatagggtcaaagaagggtgagaaagcatttattggataaatcctgataaattgttagtttttcttggaataatggagaaagcaatcaaccaatctactacaaaaaactgatctttaagatcaagataccagttattaaagctccattaagtttaagacttgttggttgatcatgatctattatggtcattgcatatcattatgcctggggtctttgtacctgagtggtgaagactggccatgtctggaacacagagagggtaaggtggggagcaataggttatcatcatgccttttattagggcttggcaccatgtttttagattttaggaaataattggtgtgcaaagaagatggtcgatatcaggaagtgtaaaaacctctctatatggccgggagcagtggctcatgcctgtaatcccagcactttgggaggctgaggcaggcggatcacgaggttaggagttcgagactagcctgaccaacatggtgaaaccctgtctctactaaaaatataaaaattagccagccatggtggtgtgcgcctataatcccagctactcaggaagctgaggcaggagagtcacttgaacctgggatttggaggttgcagtgagctgaaatagtgccactgtactctagtctgggtgacagagtgagactctgtctcaaaaaaaaaaaaaaaaagcctctctatagggacattaatttagagacctgagcctgataaatttacatataagccaaactgtagaaggtggttcttgaaaatgagtcacacacacacacaaaatgtgagaaaagaagtcaagaggccaggtgcagtggctcatgcctataatcccagccctttgggtggctgaggccgatggagcacctgagcccaggagttcaagaccagcttgggcaacttagtaagaccctgctgctaaaaatatttattattttttaattaaaatagacaagagaccagaaaatgcaggtaggaaactaggctgctggtcttagacaatatgcatgtatctcatataggagaaatggtagaattaagggcagggccaactctacattcaggtgttaagttgttccaatttggaagttggaggactataaagtatatttatcattaaagtgatgttttctttggtctctcttagtcaaagcattactcgacatttatcaaatgaattatttttgtcagagaacaggtctgagtgctctgttgttcttcagccaattaacaaatgtatcctttgtaatagagctaaaatagtacaaccccagaattgaaccttattaaatacattcttaatctttgtttggaaacctgcaatattagcctaaatgtctccatagttaaactccataaacagtttggtcttcctggaatgactgaattgacatttacactttgtttgtaaggcagacattactctgggtggtgtatcattttgacagtcttttgattacttagtgctcttagtgttgacagttaaattcataaaccagcagattgagggcagaaatggaaaaataagctaaaaatggagtctcctcatagtgattattaactaatggagggattgtaaaattctaaaactattggctatgatttaaggtacgcatcattatttgctgatgaatagatctgaagtggaaaaaatgggaaggcacgcttataattggaaaagttattagaactgctggtttctggttaagttaaccaaaagtgagacaaaagaaaaaggcaaacaataacacagtcattacctaaattggagctcgtttgcatgcttttctgtgccattctaagtaaggtcttagactattgtacctttcatcagtatctactaagatgttttaatatcttttgtccctataaaaggtcagagggtgaggtgacatttccattgcttcatttctcatacagaaattccaatatttgtctacatttgaaaagaattgcatctgcaaatttagggtgtaggaattaacagatctatagttcacatatctgtctgcaaaccaagagactgactttgttcatatgtaggagaggggtggacaaaaccaactgttagcacattttggaaaggtccatggacatagacaatgtaaatgttaactcatttctgacctgtgataaaataaggcactgaagattctttcaaataagcccttggaggagactgggaaaggcttttgccaattttttatagttgtagctactaattataagtgaaacaaaattctgcttcaaacctgctgtgaccaatttgttataaagctgtttgtgtgtgtaagaatccatacacttcttatcagctgaactattgcctcacttttccaagcacagatgtgaagtatttaaaagtctttgatagcaaatatatgtttaagagacattaaaataaaattccaaatacatgatttatgttttaagcattcagtattatttgattttcatttatacctagaaaggagatagaccacatactaattttcaaaatgtacataatatgtatctcttctcaaatgcttcagttccacagcagggttcagcgtcaggaggttgtctaatattgtttgtcattaaagacagtttaaatatacgttaggtttttttttttgagatagttttaattctcggctcactgcagcctctgcttcctgggttcaagcaattcttgtgcctcagcctcctgagtagctgggattacaggcacctgtcaccacgcccagctgattttttgtattttagtagagatggggttttaccaggttggccaggctggtcttgaacccctgagctcaggcaatccacccgtctcagcctcccaaaatgttaggattacaggcgtgagccgctgcacccggccaaaatacatgttagttcttgatgcatgcataggtagagaaaacccttttttttttttctttaagagtttaaaaattttcagggtgaaagatgtgaactgtctctggaagccagtgtgtgaggccagaagcagtgatatttctttatcctgcccatgggaatttcaagcgtaagtggggaatttggatcagactctttgaggttgttctgagagtgcgtattttcactattttgttctgactggagaagagaaaaatataagcagggaatttttaaaagttgattaatctgatgacccaggtcttattttgagtttacaagggacccagaagtggcagatactcaagcattttcacacagtcaacagatacaagaggagaaacaaaatgctcatttcacactaggagctcaagtagcgtcttttctggtgaattctccgtgtggagtgaatttctctgtctggcagtggatacattagttgttcctgtgcgcgagcccttgtgttatggggtagaaggaacaatgactgtagtttaatcaagtctgacgtcttaataaatggactgacaaataaggataaaataccaattttaatttaatagagccacctatccttaacgtttttatttggctgtgccatgtatttattactgcttgatggttttatgtatttaatttatagtgagataacaaagcttattttatttcatttaatagtgaattacaaaagtctgaggtaattgttctcacataaaaatatttgaagtgaatttacaatatttgtctttgctcatgtgtgattacagtttttggtgttcacagaggatgaaagtcatttatgggcagttgtgtgtttgaggaataatctgatgattgtataatttgtctttcgtcatagagtctcctgatatggtattaaaatgagaatttcctattcaagtttcctactgtttgcgaagggaagcttctctttgtaatgtcacgaatgcaaaattgatatcaatttctctaaataaataattatgagaacatcaaatctagaaaaaaaaacttccagtaacctccatttatgtaagcacaaatgaagttgaaactgcagagatcacatcaaagtgtctgtgaagaaaaactgctgctaggataagatttttccggctgtttaaggtgcctgtgacatggaaagctggaaataataaatccagactattttgttggaaagtgcttactttaatgaagaatctgaagaaacgcttaggaaaagaaaatcttaagggaaatacttttcttcttttagcattagtcggtataatataaacgcttaggagaagaaaatcttaagagaaatacttttcttcattttagcattagtcagtataatattttaactccttgaagggtagatatatccaaaattagttgagtgaaacttcactcatcagagaaaattggagaaacagtagaagagaattgaaatccacattggagtcttccttcacccaattattttactttggctcttttgtgtgaaatatgtgtttcagattttatagttttcaaaatccatctatatttattgtcttaatgcttaccaaaaaagtaggctgtgaggtgtctgctcttagtaattgcagtcacaatttttgagtactgggagtcaggcaccaggctcagcatgttgtgtgccatctctgggcctttcaagaatctctcagcttcgttttaaggaccctgccttagtcatgaggaaaacgcccgaggctggctgtgggtctttgttcaggagtcacggaattagtctgcaccagacaaaatacaaaagtccatcctattctattttaactgtctccatatattttaagttgcttcctcttgtacaataagatcttaaagtgttaaagaacacacatattctactgagttaccataggtcacacaaagataaacaacacattttacaatatagtaggagaagcagacatttcatacacaactgtaataaaaagaatgttttgaatggaggagtatatacaatactagggatttattaaagaggaagcaattaatttgtgctggagggaataagagagaccatttgaggccctgcctggtgagctgggacctgaggggtgaataggactttgtcaaggagagaagtcaagtatgatgaattcaaaggaaggtataagactggaagggaacctggggaggggaatgtggaaatccactagatgatacaatcagaattatattaggtcagtgcaaaagtaattgaaagtaatggcaaacaccgcgattacttttgcaccaatctaataactaacaaacagatacaaaatatacgagatgaagacaaaaaaattaaaaagaccagagaatattgtatgtttcttagtggcccagaagaatgggatgaactaagaggtgggattagaaaaggaagagtgtctccctaaaatagagaggttggatttgttgattatttacccataggggcggagatagtaaaagaaagagcaaagatgtcactgaggtctctggcagtaaagacaagaagagaggaggatcagcagatcaacaggtggtagatgatggtttccttgtgtgcagtgggccactggatttggcaacaatgaggttattggtgtgggaggaattatcttaatgaatgataatccaattgtaatgttgaagaatatgtgaaacttgaggaatttgaaccatgcacatgtggaatactttgttgtcttccaaattgtgtctaacttggcagaggagaaagaatgaatacatgggcaatgctagctggtctaataatgatgttgatgagaatggctaggagtgattgagctcataccaggagccaggtgttacctgagtattttcccacttaccttcttagcaccctcatgattttctttctaatgatgaagggaaaatatatatggaacttaacagagagtgatcagccgtgtggcagagaagtttcaggactcaggcatctgggcttggggtgagaaaatggattcacagtaggagctggaatggaaacaggacggcattaatgtttcatagcactttgtacatgcctctgttgcgggtggactgtgtagccactgtctaagatgtggtgtggaggtagaagtttgacaattatcttccaatgctccttcattagaaaaggagactttagaaggtggatttctctttccaggattgttgtaggaatgtggttaacgatagaaaatttaattcaccaagaaactaatgtttataaaagtggttagagccctgtttcaagaatagtgcttaataagaagtgaaatagtattagctcttattattactatcatcatccatccattgagccagttaatatgaatgctatctactcagcaggggtgaatccagagataaaagacatagaatttgccatgaagtatagtataatgggaaatggaggcaaagctgccaactcagagggtactgacccatttaagaagagattgaatgaattatgacatcttgaatggtgtgcactttttttttttttgagacagagtctcgctctgtcacccaggctgcagtgcagtcacgcaatctcggctcactgcagcctctgcctcccgggttcaagcaattctcctgcctcagcctctgagtagctggaactacaggtgtgcaccaccacacccggctaatttttgtatttttagtagagatggggtttcaccatgttggccaggatggtcttgatctcctgacctcgtgatccgcccgccttggcctcccaaagtgttgcaattacaggcgtgagccaccatgcctggccagtgtgcactttctaaaccttcaagacagaagaaataacaaagacaaacagagttgaatgcattagtatttacaattctcaaactgaataagaaatcaaattaggagccaaataagctgtaagtatgatttatagcaaactataggaaacatatactaaagtttttagtagataatgctgtcatttaatctgctaagaaatcagtaagcacctcatagattagtgatcaatgtatgtgatcatttactaaatagtaatgaaaatgtctaaaggaaaacaaaaacactacaacttagaaatgcaaattaaatccatcatgagctaccttttcacttggcaaataagacagattttttatattttcagtgactgtcgatttccagtgaaatgggttggctcatgcatgatcaacaagaatataaatggtgcaatctgttgaaaaaacaacttggcaatgtgaaagtctacatttgagggcctgtactactgaaataatattaagtatgataaaggcaatgtgcatttttatttcagcactatttgaagtggtggaaagttggtgcaatcaaagtatccatttagaagtggggagtggttaggtaaacagtggttctaagggaacatttagaaggatgttagtaatgtttgtttaggagcatggaaattactcacaaaatatcattaaagaaataaagcaggatccaaaaactatgtatttaaaatagttaaaataatgatattcagaataaaaggattttgttgttgttaatggctatctttgagtaacagggctctaagcaatttttgtttcttttggtttgtcagtactttgcaaatattatttaactggaatctaattcatgagcatgtgtacgtgcaatcaatttcatcaccaactcaactttgagtagcattttcaaatattcaccaaagtatttcatcttggtttttttcacagtaatttgtaagatagggctggaagtatatttttcttttagagataacaaaacaggggttcatgacagctcaatattaaacatattattttagaaaaacatcataagaaacttcataagaaaaaaaacggaggaagagaggattaagtaaagtcacctttacaagttagtttctatgtatattttggtacaatatctcaagaatgtggggagagagagagaatggcaggagggaaagttctggaagaaaataaattgcatgttttattttcttcaaaagcacttgggtaccaagaaaacaaacaaaaatacctagcagaccagaagcttttggttcaagtaggtaaggagagccataaaattagaatacatttattgttcgtgaccagcctgaccaacatggagaaaccccatctctactaaaaatacaaaaaacttagccgggcgtggtggcacatgcctgtaatcccagctactctggaatctgaggcaggagaatcactagaacccgggaggcagaagttgcggtgagctgagattgcaccactgcactccagcctgggcgaaaagagcgaaattctgtctcaaaaaaacaaacaaacaaacaaacaaaaacatttattgaatttattgagaaggcatcattgaagttgacattataaattaggatatttttctcagcatccacatcccttttaatatcttcttgttttttgtctgggtttgatatgtcatcattcaatgttagatccatcccagccacgttgctgagaataaacccaatccagcactttgtcctcaacaaaacatgcacttcaggtcagacagacatggattccagtctgggttctaccatttcacggtgacataatgttgggcaaattattcaacctctttcagcctcattgttctcatgattaaactgaagaccatagcttataaaatgatttgaggggattaaatgggacaacacaggaaaaggcctagcacatagtgataacatgataacaatggcaacattaatagtaagcaacataatatatgctgaataaatgtttcttttctaaatcttcctccatcaggatatccactgtaggttctgtaagggagatgcaatataaaattcactttctagattggaggagttttagtcactgattagtcaaattattaactttaaaatgattatatataaagtagcatgtgcatattaaattattaatatattaggttggagtctagaatagattccattcaataatttttcagatttaatgaattattgtgcgaagttattgaggaatgacatgtaatatttattatgaggtttggggaaagaaaattgatattttaaaacatgaacactctatcaagtttgtaatagagctctattttatctcatatgagaaaaggttccccaagttgtctaaaaactgaaatagtttcttataaacatttaaaatgatataataacagatttctctcctcatgactaaaatattgctgtaggctgtagttacaaggcaatttaaaaggggtggaactattgataataatcattactataaagcacccattagtattttttgtttgtttgtttgttttgttttgttttcaatcttaaaatcaggtgcagcatgaaaacagagactagacaatgagctagatacagaaactttagaccaaaactcttcaaacatcaacattaggatttgaggacttttctagttttagaataccgtggtctgaaaatctttagtatcaaaaagtatgaagttgtggaatatcagatttttttcaactacagaatgaatacctagcctctatttgattttaacacaacgtctctgtttattgtaaccgtttgttaccataaaagtataaactgaaaggtagcaatgatgggtgagtgtaatatattacattaaataaacttgtcctgtgagcagaacatggaaaactctgtttacattacagtaagctgttttctgctgcatttacaattctgctgtgcaaataaattaaggggacttatgacagctcaatttactttatctggtgaaaccccaaagacattattactataattttagcatatttaactcaatgtaggtatttagtaatgcaataatcaagcaagtctttttaaaggaaagtgggttttagctgatcatttcgaaaaagaacaaaagaaaattactatataaagactggaacaatacaatccaacacacattaaacttgcaagggaggtgactatgaaggtcattgtatgagcttgtaggagactttaaaaatggaagggtgggtactatttagaaaatgattttttatactctattccactagttgatctagatagcaactttgatttggaccgaaagtaaaactggtagagggtgaaatttgcagatggttccaaattctcttgtattaagtagaatagatactactaagataatagttaattacagtatttactgtacttaaagctgagacctaattttctcagctttctatttaggatgaattgtcacattctggtgtgtgtgtgtgtgtgtgtgcgtgtgtgtgtatgcatgttgtgggtgtgtataaaattgtatcatagaggcagtgtaacaaagtggagtggaaagagacataggtttggaagaagacctaaattcaagtccctgcgtgttaggaaggtgatcacttcagcaacgtgaattactgggggttgagttccggctttcaaattatgttgtcttaatttagaattgtctgggtgccctggaccagctaacaatataggaagtagacaccactgccttaagcatctcatggctgtttctgcacatagttgcctttgtcaagaacacgttttgcacgttgttgcctttgtcgattacatgttttgcccttcctcctccccgtgagagtcttgttacccttctatgctcatttcaaacattccttctgaagttttcctccaaagcatttttagttatcttttgtttaaaaaatattattgattgtaaatgaaacttaagtaccttgtggaaaaatacacaaatacaaaggtaaaagtaaatatcaatcgtaactgcttgaatcagggataaatatcattagcattttgccatatttctttccagttttattttctgcaaattcatatttcccctccaaagaacaaacaatagtaacaaaaaaaccaacttaggaatttatttgtatacttttatattctcttttaacattaaatcatgtccatttgttcatatctttattcttataaagcatgattttcagatcttcatagtagttcatcccagatgtatagcataattaatagctcctcttttttttggccattggggctgcttaaaatattataagcaaagcatgaaaacattcttataaattattcttgtccggatctaatactatttgtgcaggacaaattcctagaagaattcctgggtacgtacattttttatacttttgaaatatattgccaaatgggcccctagagaaattgcatcattttgcacttctgccagctctaggcagtaatggccattttcactgtggcttttcatgcaagggcaggactcatcacacatacataacaatacataaaatcacaatacataaaatcagtgttcaaggagctgtatcagttttaaatttgagcatcgtctgttataggcccaatgaatgcctagtgaaggccaggcatggtggcttacacctgtaatgccagcactttgggaggccatgacagaagaatcacttgagcccaggagtttaaggctgacacgagctatgatcatgccattgcactccagcctgggcaacacagcgagacccctgtctctacaaataatgttaaaatcttagccaggtgtggtggcatgcatctgtagtcctagcaactcaggaagctgagatgggaggattgcttgagcccgggggttggaggctgcagtgggctatgatcatgccactggatgccaggctgtccctaaaaacaaaagaaagaaataaaataataataaatgcccagtgaaccaaccacactatagtagtctaaatttgaagtaaattaaaagagcttatcttttataattctgtggaattaaacttttaaattttatcagacaataccaagcgttattgccaagaattagtatttaggcaagaagagatggatcaggtcaagaatatggagagctgacatctcagggtgttgagagcacaggctcaggagctcagagtgtggactcagaatctggtttgccatggaggggccacttcagctcttgtgcctcagtttccccactggtgtaccggggtaatagcagtgctcactccacccatgccgtacagattggacatattcacacatgtagagcacttgaaacagtctggaacatatttttttaatcagattttcaactgaatacagatttcaaactttaataagatattttaaatatatttaacttaataaccagtagggaaacacccagcaaaaggatgggaagaaatttataaacacattttaacacggaaatattattgaatgcaaaatatatgagtaaagtaattaaaaatgtacatacatatacataaaagatgtgatcttgttttaaattctactgccttttaaaatggaatactctattttagaaaacctatttcattatatttttaagtagttactatttgattaaaatgcaatatatttttaaataaaaaatatgcactttaaacagactatgctgtatctatatttattcttacattatgcaacattgctgcttaaatatactatccataaaatattaggtgcatcctttaaaaatggtttttattcctttcttgtaactatgtaatagatactgatatcctattgttataattcaagtactttatatatcaacctcatttaggccacatgacggaaaaagctattctcatgttaaaagaattgtgaatacttactgactgaatgatttttaactttggcttgagttcctactcatgtaacaaaaatcacctgccccatgtagaagttaattctaatttgtgtctataaaaatattatttattattaagcaactaacagttactcttattacccaaccatgaatatctacagcaataagtggctggtgacagcttcaggaggttgagactgtatgagaaaaagaccgcaggaattctagaaattaattgcttcattaagtccagactttaaaggtgattgccagtttttaaaatctctccctgaataaccatcgagcaggattctaagtatgttctaatacttccaatatcaattttcactgtaaccaatagatttcaccaaggtgtaagcttagtgtgataatgtaagacccatcagaatctgttgcttgatgtctgcaaacaaagaattaatgaatgtgtcaaattcgttacccaaagggagtataaattgtaacagaactctacattaatatctgacagttatatttaaaaagaaactcattcctatttcagaaagcagtgaaagttaaaaagataaaacatactctttctgtatttaggcttgcttcttttacttatttattttattttcttattattttttttgagacggagtcttactctgtcacccaggctggagtgcagtggcgtgatctgggctcactgcaagctcctcctcccgggttcacgccattctcctgcctcagcctcccgagtagctgggactacaggcacgcaccaccatgcccggctaattttttgtatttttagtagagatggggtttcactgtgttagccaggatggtctggatctcctgacctcgtgatccgcccgcctcagcctcccaaagtgctgggattacaggcgcgagccaccgcgcccggcccaggcttgcttctaattatatgctgggggatgacacgagagactaggagagactagacacttcagctcagaagcccttcagacttcaagctcaatatgctgtcgtgatgataatttgacctctccattatatttcagttttacttccaggacaaaagaaagagtaaaactttaaagtagtcatcttttattcctaccttacaatgtttatctatgcaaaataatagctaattccaaataacaaatggaaatggatttgttgctatctcatgtgttgtagcaaaagctaagctaaaatacctctttttagaaattgattgatttctttaatatggtttcatctaaatggataccaatgtctatgaaaacatctatgctgtcattttaaatacatgactacacctttgtacagttgtgcaaacacattcttgtcttattagaaacaagatgctgcctctttgtatttccatacaattaacatggatatattccaaaatgaatgaacaagtttagctattaaaaaaagaaggatgcacgtaggtatatattatgcattctactaggcattaattttgtattctattagaccatcttagatactgcaaatactctaaaagtgttattttcatgagcaaatatgtctgttgagcagcagatcccaaggtggatttagaggtacaacaaattcactgggatggcggcagatgtctgtgaaggataaaggggaggggagtgagagtaggtggggaaggcctcaaaaccacaacacaggtggctccccagtgaagggagaggggaagcaatgaaggatgggagagcctcagaccgcagcacagttaggagaaagtcttagccaggttgatgggaagtgtataatagtaggaaaaaataaactaacagttttatcctactgtaccctcaacactcaacactctcaaatgtgtagggagtttcccccaagcaccaagcagttctccagaggatgctgactgggggccctacaattcaactcaattctgacactgtccacctcgagctagtggcagatcccacagatgaagggcttactctcacaagactctcccccacttccaatgacaatagcaagtctgagcttctggagcttctgataactataaattgggggttcccatgacctgctctttgaggtaaattatttgctagattggctcattggactcctggaagtgctttgcttatgcttacccatttgttaaaaggaaacagatgaacagccagatgaaagagatgcacagaacaaattgtggaggaaggggtgaggagtttccaggccctctccaggcgagccaccttcccggcacctggaagctctctgagccctgtccttttttttttcttttttttttatggaggcttcattatttagatgtgagtgattcaaccattggccattggtgatcaactcgatgttcagcacttctcgcctttccaggttaggaggtggggctaaaagttccaatcttctaatcacacactggggcaccctggcaacaaggccagtgctaaggctccctgaccctaaagccatcagtcatctcagcatacaaaaagacacagtgctttggagatttcaaaagttgtaggagctgtttgcaaggaacaggagagaccaaatacaattatataccatatagtgttgttttccttaactgcagactgagataactatagtggtcccgtaggattataacagagctgaaaaattcctatcacctagtgatgtggtagcagcagctcactacccgtgcatgtgtacgggttggtgtaaacgaacctactatgctaccagttgtatagaagtatagcacatagaattatgtatagtacataatacttggtaatggtgatatattattacattactgacttatgtatttactatactatatgtttttaattgttattttagagtgtggattttctacttattttttatttatttatttatatttttgagacggagcacaatggcgtgatctcggctcagcgcagcctctgccacccgggttcaagcaattttcctgtctcagcctcccaagtagctgagattacaagcatacgctaccacgcctggttaattttgtatttttagtagacacggggtttctccctgttggtcaggctggtcttgaactcccaacctcaggtgatctacccgcctcagcctcccaaagtgctgggattacagacctgagccacagtgcccagccttctacttttttttttttaagttaattgtaaaacagcctcaggcaggtccctcaaggggtgttccagaagaaggcatcattatcataagagatgacagttccatgcatgttcactgcccctgaaggccttccagtgaaacaagatgtagaggggaagacggtgatattgatgacattgaacctttgtagacctaagttacggtgtgtgtttctgtcttagtttttaacaaaaatgtttaaaaagttaaaaaaatgtttacagatagaaaaaagcttatagtataagggtataaagaaaccaaatatttttgtgcagttgtatcatgtgtttgtgtttaagctaagtgatattacgtttgagtcaaaaagtttttaaaaaatttataaagtaaaaatgttacaataagctaaggttaattttattactgaaagaagaaaaaaattttaaataaatgtagtgtagcctaagtgtaaagtgtttataaagtctccaggatactgtaatgtcccaggccttcacatccactcaccactcactcactgttaccaaaacaccagtcactgggatgacaagcattgacaaggaagaaggctttaatcgggtgctgtagacgaggaaatgggaggtcagcctcaaatctgtttccctaagactaggggtttatatagtggggagttgggggcagtgcctaacagtgtgtaagaaaacaggaactagggaggggcaaggaggcatctgatgccgtgatcctggtgagtttcagttctttgatactttttttgagaggcctgaaggtcctttccttgataaaacaaatataaattttaagccttaccagcagaagggtcaatttctatgattattcaaaaacaactgtctgtgagagtcgggctggtttcatgactaactcacccagagcaacttccaatcctgcaagctgcgttcgaggtaaatgccctatgcaggtaaaccgttttttatcttttataaggaacttttagtgtaccttttctatgtttagatacacaagtacttaccattgtgttacagttacctacattattcagggcagtaacatgctgtacaggttaatagcctaggagcaataggttgtataccatatagcctcagtgtgtagtaggctacaccgtctaggcttgtgtacatccactctacgatgtcggcgtaatgacagaatcatctaaggaggcatttctcggaacgtatcctggtccttaagtgatgcgtgaccgtatgtgtttcttacaatgtcacgggaagtttccatgccaaagtagtgtacatgaatggcccaattggggtaccctgccatccttgatccctggatgagggtatccagggtgcaacatttggaactggggctgtggaagagagtgtggcctggcatgaatgccacactggatcaaaaagtacaacagcttgaggctgtcaggcaattgcccttccccagagcatgttctagtgaagagagctctgagcagaaaccactgtggccactgtactgacccaagtataaaaactaaacatacctttcttccacaggagctgcacttgacagcttatctacctctaacatctttactatgtacttgaagatgtacatgtccactttgtggtcaggtgtcttaagcctcaggcattccagttctgagggaaagccatagatgaaacagcttgttgctgtcattccccggaaatcctcagccagatgcatctttgacgtttgcatcatcctttctcaggtcaaaccagtgaaaccattggaatctacactcaggtccctattggcccctttctttgtatggccataggcaggttacttaactttttaagcctccattttcgcaactgtaaactgggaataataatagagtcaagggctgaaagtgaggatttaatgaaagaacacatataaacctctcaatatgatgcttgacatatgctaagcaacctaagatattagcagtttttattgggattgtagttttttagtgtccttgtgttatctatacagtttacactccagaaaaaaaacagattgttatatacgtgtcttctatttgtgttggcaggctttattttgagagctccaactatgtccttcaatttaatatgtatagtataaatgagatcagagccctataaagcatcaagtttggtactttcttgtctagtgctttggattttaaatttgaggttttgtctatttgcaagcaaagccatagttccatagtgtgcactaagctttcatattccccagggacaaaaataaacgttgagggcttttgagtggataaaagcaagcaagttacctgtctagactgaggccaacacactcatgcttcagaggtgctcagtttcagaatcaagaagtgatacatttgttacttttgtttcataaaattattaactgcttgataatgcttttgaaggatatgagaaaaattaaagtggtttaagaaggagattataaactaatttaaaggatggactcaaatatggtttatgatgtggatccaaaccaagtaacttgtgaaatggtttcatcacttgtttctgtccatgaaggaagttgtttcttatgggaaggtagaaatttgtgggcttcaattcagtctcagttatgccgtacttgtgttgttcaggaaagtacgtgccacaggccacagtgatagctgaagaattgtagctgaagaaaaaaaaaagtgttatcaagaagcttacattatacttgggaaaagaaaggaaaagaatacataatacgggagagtacataagaaaagagtagaatgtatggtatgttaggtggtggcaaacgttatcaagaaaaatgaaaccgagaaaagggcctcgtttttaaagtgacagaggtaaccataaacttttatctattaactatctacttcctaatgaacagatgtgactgtgtttccaggcatactgaagccactggatacaaaagcccatatttttaagatgactggctgctgtgtttcgggaagtggtgggtgtctaggaagcagagctaaatgtgtgatcagggctgtattggtgtggtttcaactaagaaatagagcagattgcagataaaaagaaatatattgcttataccaaaatggaagtccctactatcttagtactaagctgataaatttaaatgctgagtatatttaaaactaatgtaggaatgaagatatataaagtaaagcataataattataataatagggcatattatgcctaaattccataaggtatcatcagtgtacaagctttataacccaaagcatttgattcttgaatgcattttgaaggaaccttcaaacttcataaatctttgatttgaaagatacttctttttaacctgcattagttttcactgcataagatcctcatcagaaacattaaggaaattgacttggtattgttatgggcataatgatccagactcaaaactctgaaatagaactctgtactttgctgctcatctgaatgcagaaagaagaaatgggagacccccccccatcagggtggaactcttccggctacttgcaccttagatgtacaggtcttacttactctcattataatgaaatggcacattgtattgaacaaagctgtaggggtctttttaaaagaattatgttcactgtagttagggctcattctccaccattaactgctcttctcccacaagtggtcaaggtttctggatttcctgtgacacaggaagaggtggacaggggattttgtaacacagaccagtggctagaaagatatttccaaagaagtagcatgaagtttaaccatcatcttgaatctggagtcctttttgtccctaaatctaaatgaaaaatcaagtacctattttcaaataacagtcataattaaagccaagaaaaaaaacatgtaaaaatcatttatattcgttttgctacattttctacttatattttaacaaaatatggctgaaaatacattggatttaaaagtaactgtaaggacctatttaaccctcttaaatttccttctaccctgtctaaaggagtcttcaaaggaatgtatattattattatttacatttcatttgctttccatattaatatcatccttagaatccttaacttgctttaagcactagtttgtaagaagaatggttataagtataaaagtgagttccactgaatgctatacatcttcaattaagattgataattatacttaaatgaaagcaacattcattaatagatatggttttattttcatatttagagaaccttttttggagtgacaggatgggtagttctctgaggttcttcttctctaacctagaattattttaacacagttgatagttttgtctaccagtgccataaagcaaatcttagtggtgagagagcttttgacattttctccaaacgattcttattaaaagtaatgtccacataccctgaagaagtaatgtaaatgcattaacagatgggattttgagattagctagctgtctcctaaaagttgtcaacatttgaagtattcatttttatttaataaataatgatcacgcattaactctgtgttaggccctattcaggggctttacccatactaatttgactctgcaaacagccctctgaggaaggtaccaagggagaaatcaagacacagaatggttgtgtaacttgcacaaagttacatggctaataaatggtcaaactgagattgaaacaatcatagtccggctccagaacaggttctgaagaggaaatgtgcctggaacaggagacgcgctggacatttatccattagcttgtaagaaagtgtaaggagtatgtattggggaagaatggaaaggccaaacataaaagggaccagagtgtaaagagtggaccttttgtacttctctgccctttcttgagtatgggcttccactcctattttttttcccccatcataatttaaggattgatgcttgctgctaagaagttccagggtattaagaagaatgctaatgacaccttctctattaggagataaatttgctaccaaactccatcccagaatgattggtatccagtgaaactagtaggttgtttttaatccaaggttgcatttatattttttttctcctttattattgctttgagcaattctcctctttctatattattcatccttgtatctaaggaagacattattccttaacccactataattcctgtcaattaaaaaaatctacacaccttcttccaaagataatttaaggtgattttcaaaatgacataaagtacaacacggtaagattaaagtagataagggaaataatgatataaaaattagcagaagctaacaatgagttaacactatcaattttcatgtatacttagaagtggtgggaaacaaatgaaattatagtctttcagtgatcaacacaaaaaaatgaaaatacaaaataaaatgtagtgttcttcaggttaggaaagattcttagacaaatgtatagtgattcctatgcttcagagagaaacttccatagttcctcataaagagacattgtgtgaagtaatgagtatcatctgcaatacagcaaacacaaaagtgaaattcactggactttcttaaaatggcctccattgggatctatagcctaatattcaagaaaaatacaacaaagcagttcttctaagagccaacatgacggggtccatgtatgcagctcattattttggcttgattcaagaatgagatttagtggatttggagaagaaagttcaaggctatattttctgacaaatgcttcaagtctagatatcatgtgccaatgaataaggagagatttatatgggttataggttctgatcaagattatatttaaaattaaatgcgctttttcccctttatagtataatgaaggcattataacttagaaatcatatatgaatccttctgagagtagatatcaactgctgcagtttttggtcaatatacatagaagatggggtgtttgaatctcaagctagctcagggggaaataatttaaagatgacaaaatttgcaaaagctgattctatttatttatttattcaaattacattgtgggacaactggtgactggctttctttctactttcctttatggctcctttacgtgtatcttccttctgttatgtgtatgtttaacacagattctgtacaagcaaatcttaatgtgcttatgtgcgtgcctccatatacgcaaagaaaaaaaaattatcattctcttgacaggatgagctccctggtggtctctctggttgatttgcaatgtaatttgacccagcaaatgcaaacatgggccctttctccctggagatttctaatgtcatcttctatccccatttttctacctgttcctcaccaccgaggaacgtggacatcaggacgtcagcatattccatctcctcctgtctcctctggggacatgttggttggttacattctgccctcctttccttcatcatctcccttctgactagctctctttcccctcagcattctcaattctctcccactttcaaaagcaaataaatgaagtgacaggaaaaaatgaccgtccaatggccctgtcctctggcctctccacccttgggtaataccgcttctctcagctggatataaatactatttctaaaaaattatctttaatttactcatgggctgagtttctgtttcctgcattcatttaaatgttacataattgtaattttttatctttttctctgaaacataaaatgtctaagtgctgagtttgcttaaagtgagaatttcggtgatttggagatatttactaaatttgaaaactgaggatacattcattttattattccacaagcagttttatttgaacagaagtattttccttttcattatataaatttgggagcaagtagaaaatgtccctgggttataccaggttagtcatatccacgagaaccagtttttgttatccaaagttgatagtatgtttcaaaagtcatgattctgaatcttaatgctcaaaaggaaaaaaaaatttttcatattgttgttcttctgccagaacataaatacttttctgttttgtttttataatataatgcatcccagggatgtaaaaaacagaatttcaatttgtaccttcacacttttacagctgcctgcagggtacgtgtaaaaataatttgactagaagttaacttttctggtagattaggttatcaaaatgatgattaatatcaaattacctacaaatactataaaagagataactttagaatttgtaaaataaagtcttagatttactttttgtacatacagcatgtttgaagctacaggtaattttgtgagattttagcgtcctagctcaagtttacttaacaactgtttctgcagctttttccttgatgcttcacattatattagcacacagttttaaaattccatagtgggaagtacacttacactgttagtgcagacattttagagaatcaatttcggacatttgttgttatataactcctagttcaactggacagaattaattctctgatcaccagtcagcaaatatatgagggggaagaatttataagccctaatttctagaaaaggcagtttactttatgtagctaaaatgcatggctacatttttatattaaaccagactgtgtataactaactaatcgattgaacaacacagataacaaagtgaggaatagtcacacctccttataatggttttgaggatgagatgaataatagtaagcagctagcacagagtttggcatattatagatacagatagagtgaatacatgaataaataaccagtgagtatattaatattggaattgtatgaggcattattttcaaaccaaggtcagaattttttgctagatgtaatctaattttcatgcattttcttggtgagtctgaaagggtatgccctgaatgactttcctgacaatattgcatcctcattctccttatccctccttgctcattcttttgcccttttcccccaggaactgtgcacctctgccgtctcactctaattctgtgctggactcaaagccccctggatgagcttttggaatctaagatgtcttagttttaacctgtcactgctgtcttgatcttttttatttctttttaatgacattttattttttctaattattcaattgatacattttcaaaggaaattgtgaaaatacaggactatgtgaagaaaggaaatagaactcataatccccataattattaactgttaacatttaggtatttttcctatctttattctttctctttttcttctaatacatttttaattcatttctaatacattttttctaatacatcattgttgactataggtaagatgtgatatggcagatgtctgcaacttatgcatcttgcttaactgaaacctcatgctcattgattgtccctccccattttttctccccgccagctcctggcaaccaccattctacaattttattctatgaatttcaggatcttagatacctcatataaataaaatcatgcagtattggtctttcttaaatattacttccacagtgactcagtaaataaaagttcagttctcggccaggcatggtggctcacgcctgtaatctcagcactttgggaggccaaggtgggcggatcacttgaggtcgggagttcaagactagcctggccaacatggtgaaatcccatctctacaaaaaataccaaaaaaattagccaggtgtggtgatgcacaactgtagtcccagctacttgggaggctgaggtatgagaatcacttgaacccaggaagcagcagttgcagtgaaccaagatcgtgccactgcactccagcctgtgtgacagagtgagaccctgtctcaaaaaaaaaaaaaaaaaaagttcagctgtcacctgtctgcccttacaaatagaatctaagaacatatgtatatcttattttgccacttctcatcagcattcattctctgtttctgtctggcttttctacctcctatggtgaaccttacttcccgcgactgggaattcgttctagcctccatttccatggggacattgctctcttgcctggaacgccctctgtttcgtccccaaagtcataaacaaccttactctgctgccatataagcatacttgaagtttggtgtttacttctaggtgtgatggattgaaggcacaaattatttgacattcttcccatgaagaggtgatgttggtgtcccctacccttgcatatgggcaggctctggaatgttctgagatagagcaggaaggatactggaccaatttccagtcctgggcctcatgtgacatgcagtttctgccttctttctcctggagctctcattcttgacgtgccaagccaccccataaaaagtctgactaccctgaggtggtcctgttctcttttattaaagaaaggactgtcatgattcctgtctcttatttatgttttcgtttgagatgttccctgtgcttcctaaaagaagaggtgtaattaatatctagtgtagccttgtaagtccctgaaatatgcagaatggataaataaaagagagatgagccaaagtctctccatggagaattcaaaatctgtgcctcccatttgatttatttttcaaaaatctaattcaattttttaggggtctacaaaattttctgtgtaaatgtctaataataagattaaaatataaaatggagatatgatgttttctaagctttatttagacagtgagcaaatctattaaacacgcatggataggccagtccagctgatgtacaaggtttccatctctcagttcacagagagcttattctctgtgctctctgggggtaagtgaggtaacaaggagaactttctgggcttatgagatagcaaagaaaagcaaaaatctggaaatggcatgagatatttataatctgttaagttaatctttttggctacaacataggatatgtgtaaagaaaaattcaaactaaaattataaggatgaaataggactaaagagtcttgaatgatagggtgaagagttgaaatattcctccataggcagagcagtttttgacacagccacgcagtcagtttagaaagattggatgtggtgttggcagtggtttgctctttagtttctctgtgttggggtcttgcctttgtttgccatcactgacgtcgggtttgccttctcttccatggccaaactaggaactgggtaaggtgaggggtcactttctccactttcgtatcttcgtggtcacatgatttaggttcaggtaattccttatcatataattccgaacttttgagtctgagtgctaaagcctccagtcgacccttgaacaacgtgggtttgaactgcgtgggttcacttacgtgagaattttttttcagtaaacgtagtaccaagtatgtaaaagttacatctcccctgcttccctgtctacctcttccacctctttcacccctgctatccgaagacagcaagaccaactgctcctcttcctcttcctcctcggcctactcaacaggaatacttcaaggatgaaaacgtttatgatgatccatttccttttatttatttatttatttttttcctgagacagagtctctctttgtcacccaggctggagagcaatggcgtgatctccgctcactgcagcctccacctcccaggttcaagtaattctcctgcctcagcctcttgagtagctgggattacaggcgcccgccaccacgcctggctaattttttgtatttttagtagagatgaggtttcaccatgttggccagggtggccttgaactcctgacctcaggtgatccacctgcctcggcttcccaaagtgctgggattacaggtgtgagctaccacgcctggcccatttcaatttaatcaatagaaaatgtctgtactttttcttatgatttccttagtaacatttttttctctatcttaacttactgtaagaatacagtatatagtacatataacaaacaaaatatatgatagtcaatggtttatgatatcaataaggcttctggttaacaataaacaatagttaagttttgggggactcaaaagttatatgtagatttaatttaaaaattaaaatttatatgtgcaggggttaccacccctaactcccacattatttaaggatcaactgtatttctgaaaagaagtattcttaattttcaattattatgtattataatattataataattttatagaaatggagtcttgctatgttgtccaggctggtctcaaactctgggcctctagcaatcctcctgcctcagcccaccaaagtgttgggattacaggcatgagccaccgtatctagccgcatttagtattttaaattatagattacatatctattaaacttatttgggtacataaaaatcctataatacttatggtactatcagtattacacaaatgaagaaactagctaaaaggtttcagtcaatcttccatagtcatctacatgatgaagtgcagaagtgtgaataaagttcaggtttttggactcctgccgttgtgcctttcctattcactcttaaaggtactatcatcctggagtaagagtaatacatttttttcaaataataaggaaatattttgctgtccgctttaaacaggttattaaatatactaaatttttctctggttattttgtattttttcttcaatatcgtacacttagcagttaagacagtgacccctcactataagaattccatccctagggacttcaaacaaaccatgtattgaaattgagtgcttgtttttcctttaaaaattatatttgttttaaattatctgtgatgaagaggcttcaatcatgactgaatgagtagaggtcgcttggtgtaaatgcctctagttctttttttttgagacagattctcgctctgtcacccaggctggagtgcactggtgcgatctcagttgactgcaacctctgcctcctgggttcaagcgattctcctacctcagcctcccgagtagctgggattacaggcacatgccaccacgccaggctaatttttgtatttttagtagagactgggtttcaccgtgttggtcaggctggtctcgaactcctcacctcgtgatccgcctgcctcggcctcccaaagtgctggaatcacaggtgtgagccaccgtgcccggccgcctcgagttcttaagcaagtgatacacagatatttaaaaaatggggtatatgattgctgtggtagtggacatattctataagcttacctattggctttattttaaagtgcacagctatagtgctgtcactgaattgcacatacatttttgatgggataatttgaatcttgggataaagtgagttatgatgaatgtcatgcttttctcttgcttagagggttggatcacttttattttctgtatttcccgagtgtcatccttaaaatagaattcatcattttctccaccaattttccctacccccccccaacgttattccaagaggaaaagatgacaaaatgtaatcatttgtcttctcagagtctgagggtgttaaagagctctgagtgctaaaacagatggaaatatgctaaaagcacatggcccttacactttattctttaaaaagctccaaaacttagtcttagtaatggaataggctttgatttccttgtgaaaggcatatataaatctctgcttctccatattctgactcactgctgttgtcccagggttcaaaacatccattttgggtcagtcattgagaaatgctcaatagactctcactggcacttctgaaaaatgccattttttaaattgataatagaaataagatatatcaagctataagatgattactaaggtttatcagaagcttctgacttttgaaaaaataaagagatgtcctcatctgcctttactcttggaatatgtttctaccatgataatggtaaatatatgttttctatgagtaatgactcagtatgtacttattttaaagtataatttttcttccttggaaaattaaatttgctgaagttaatgtttggcattatgtttttggcaaaatgaaggtgatggttgccaatcctatatgaatgaaatttgctattttaggaggaattttgttaacttctagaaacagcagtcaggtctttaaattctatgctttagatggtgcactcaagtatttagagcaataccattttactgtttagcatttgacatattgaaatttaaaacagtgaaaattagatattagtcctatgattttctcttcaaatttaatgtcataatatgctttaaatgattcatttgtaatgactttatatctttttatgtactaaaaccattgcaagcattcagcgtgaccctgaactccagcatcggctatgtggctccgtaagtccactctcctagccaaattgggaaagatatgtctagaagttcaaataaaacaggagacaaagctacaaaaggtcaataaatccattagcagatcattattaataaataataccaacagactaatatgtttctacaaaaggaaaaattatgctgaattttatagacaccaaaatttataagggaagaccaaaagtcattaattcatataaaaggcaagtgaagaagaatataaattatactagatgtcaaaatgcccgagttctagtctataattcatgtctatccaacaaggaagtctagattatttattcaacctgggtctcggatctactcccctgaaattagtttattttatagggttattgtagagggtcagatgatacaatctctgttacagtgcttcgcactttcctgtctccacccagaattgatcatacctgtgtgtctctgtcccctcctcccatacgttgtatgtgaaatttattaaacccattcaattttaaatgtttctctgtgctggttggactgtgagctcccaaaggtctgtctctgaatcatcttggtatcctcagtacctggcacgtagaaggttttttaacaaatgcacgtttgaggaacaaactttatttttacaatcattactaccacatgaaaatcttcaagctggtagttagttgtgagggttatgttttagacaccagccttgagcacttttttaaaaaatttttttatttttattttttaatgaagatggagtctctctctgctgcccaggctggaatgcaatggcacagtctcggctcactgcaacctctgcctcccgagttcaagcaattctcctgcctcagcctccggagtagctgggattacaggcacccaccatcacgcccagctaatttttgtacttttagtagagaggtggtttcaccatgttggccagggtggtcccaagttcctgacctcaggtgattcgcccgccttggcctctcaaagtgctgggattacaggcatgagccaccgcactctgacagtcttgagcactttgtcagattccttggacagcctccttttcaaaaccaccatgcatttccctgacttactgcctagccccttaataaactggctggagtctcaggtgaaggcttaagtttgtgtcacgttcacatcctacccactgagccttgtctgtgccattcgccctgtagtgaatgtgaccttatttggaagtaggggttttgtagatggaattaaagatgttgagatgagatcatcctggatttaggatgggaccttaaatccaaagacagtgttattataaaagaaaggagaggaagatttgagacccagaggagaacacagaggagaaggtgatgtgaagatggaagcctatagtgatgctgctgggagccaaggaacactaagtgttgctggcagccaccaaaagctcagagaatgtagaaccaactctccctgagaactccagaagaaaccactactgcccactctttaattttggacctctggccaccagtgctgggaaaggatacatttctgttgttttaagccacccagtttgtggtaatttgctatggcggccctagtagaaaaattcacacccccccactcttttacagaaaatgttaccgtgtgggccttggatctgggttgtggagtgaccatcaaagggcccagggaagcaacccagaattgtggaggtgtttacacactgtggtgtgaaccttaaccaactggaaacaggagggaaccagttaaacaatttcccctgccttcttcctcggactgttccatagtatgatttcctcttgcagtctttctgggaaagcctcagtgcctactggccacatctgtctagccaactgcattgtttcttcccaggtcattgtggagtggaagctagtacatcacatcacattacatggcattgttttgtgtttttattttgcctcattttcttttttcctcactgtcaccaccctcaaattgcaccttcccaataaagtgtcagtatttttttttaaatccttgcttcaggctctggtttacagatgacttggctaaaaaagtgaatggattcagttcaagaattataaagaggctttaattttttcattacattcacttcctgcaaaatttctggtgaaataaaatagtttccagtggaaaaggggctgagtttccagcctagtatcaaatagatcatttatagaaacaagatttcctgttgcatatacaaaaactgtgtatctttctaatctcttaaatagttctaagaaatgttcataaattctctgtgttaattgagataatgaatcactaattttcttttgaagaatttcaaaataagtgtttatgatagtaaattttagttaaacatttcactgttgctggcctttttctttttgtatcaaaaagtggtgcctggaacttaactgagctagaggagagagctgagctgccaggtgttgagcagcaaatcaaaactacaagctgcaattgacagagtaaagacgttaattacattatacattatatgttactagtagaagcaagaagttaaaacctgagaaacgctgactccccctggtccattgttccccatggaatgacgcacagttgacaggtagatccatacatacttggggttgtcttatggctcagagagcctgaacgaaagactggcacttttatggaccctgaggtcagaggcaggatcaggaagaggggctaggagtgggaaaatactgggtagtgagtgagagtaggggaaagcatcttcaagatttcccccttctctcctctcccactgaggaggtctcagcagagccacctgaagaggatctctgcccaaggcctcagaggaagagacctaggaatgaaggctctgggcctaggaatacacccattttgagagcacggctgtgcagtgaggtctgaggtcttgacttcagttcccatcagagacagtgtgtcatgggctgtgcaccaaacctggagccaggaagcagcttccctgtgcggcctgcccagcaaagcctgtgtgattgactgcggggaggcctgagaaatcacacacaggttattatccacgtgctggactcgccaattttttttttgttgttgttattttgttttgttttgttgcttgcctgtatgaaggagactccaatactctgagagtaaccaaatattcagcagaaaacttcctggcattccatgcatttattatgtgatgtccagtattacttcataggcagataggacacaagtgattgcaagcttattagcctcaaagaacagggaagatagcttgttacatatctctattattcttctaatagcttcatttctggcccatcccgtcttgtagatagccctgattgtccctttcttgtcctcaagtataggtactgagaagttttctatcatgtatcttaatttagttatataatgatttcatttttcttatagatttggtgtttgcggtgacctaatattgtacattcggtgattcctctttccttcctgtagccacactctagaggaagccctcattgctggaagctcctgaaaataattaatagagtgatgtgccatgttcattgttagcaaaaagcaatgtcatcaaaagagcaattctgttccgatgtggcaaacttaactgccaagactagacaaaattttttaaagagcaggtaacaacttgcttttacagataacaactttgcagggacatgaatggagctagaagccattgtcctcagcaaactaatgcaggaacagaaaaccaaacaccacatgttctcacttataagtgggagctgaacaatgagaacacatagacacagggagggggacaacacccactagggcctgttgggggtgggatggaggagggggagagcagtaagaaaaatagctaatgcatgctggacttagtacctaggtgatgggctgataggtgcagcacaccaccatggcacatgtttatctttgtaacagacctgcatatcctgcacgtgtaccccagaacttaaaattaaaattaagaaaactatagttattaaggcatgatggtattggtactgagttatatacagtaaaccaatgaaataacaaagaaagatcagtaatagtctcagataaaaaagaaatcttgatgtgtgacaaattagcatttaaaaagaacagtttttttaaatggtgctggaaaaaaactggctatgtataaacacaatgaataaaattagtccatttcctcaaaccaacttaactatgaatcccaagtctattaaatactaacttttaaaatatgaaagtaatataggagaaaatctttatgaactcagggaaaggaagaaatacaccataagaagaaaatactgatccatttaacttaataaacgtaagcatatttgaaaaaaaaaaaaaaaaaaggacttgcgaaagtaaaaagcaagtcagagactggggaaatttatctgtaacacatataaccaaactagattggcatttagaatagattgaagcttcccagagaaagacatcccaagagaaaattggaaagaaaagaataggcatttcatataagtgatagttcattcaaatggctacaagaatgtaatgcagcagagccctcaggaaatgttggtgagtaagtaattttgtgtaactaatttggagggtagtttagcaatgtacagtaaagcagttttactccttgatattgatattttaatggcaacattataataattttataataatgaaagccagaaacaactcaaatgacactggaaaagaagataggtaaactgtggcgccttattactgtggaatcctgttcgctgtgacaccaacttggataaatgtatctcccaaaagcatttagtaaaaataagtaaataaagtaaataaagaggaattttcagagacacaatacgttattataccagttctgcactgttaaggcatatgtaagtaatgcgtattatttctgtatacacagagttgtagtaaatttcaaaaaaaaaaatgcctgagaaaggtaaatataaaatttaggatagtgtttactctgaggagagcaactgagaaagaaatggtattagggaaggtttcagtggaatctgtattgttttatttgaaaataactgaaacaagaaaaagtgctaatatttgaagggctgagtgttgagcatggatttttaaatattatatacatagcattatcatatataatgacatttcagagtataaaagaaaaaataaaattaaaatcaaccatataaagatattcaatcttgtttaaaaagagtaactaaagcactgagatgttacttttacttataaaattagaaaagcatttaaaaaaataactagcaaacttacgttgaaatatatttctcataaacttcattgtaactgcaaattggtaaaaatattctggaaattaatttggtagttcttttgcctcataacttgtaagttagtattgtttttacttccataactctgttacaagtaaattattagaaacacactttaaggagtatcagcatgtactatagtaacacatacatcatgtatatctatatattttgattattggtgtagatgcgggtatatgtgtgtatatgtttgtgtgtttgctaacttgtttttctcactcttgtcaccatgccaccagcatgtggaatagtgactggtgtctagttatgctcaatacatactaattgtagaatgatgtattatggaaatataatgagacaaataatcaaaaaattaagacagctttgagaagtaatgtaattattgacaaaggaaataaataacttgattcaaactaatttagtgtagtgaaacgaaacaatgccaactatcagcttataagtggattttgttgcagaaggtgggctactgcatacaaagaacctatttaaaacaaacaaactaactacccttccaaaaattatctgaaatgatttttactgaagagtaaatattcactttttttaaaatcatgaactgatatgttgttaatagtagactgtgtttacatcaaacaaaaataaatgagacagctaaataagtttgcaatacttagtactattctaaattttggccacaagcagaactagtttgatatttcctactcacaagaataagattaaattatgtttttatgtctagttgtttggggggaccaaagtaccagacatatatatacaattaagaggaaggtctgtgaagaacaaaaaacaattaggaaaatggaataatttaattcctaagtaaaattaagttgacaaaattgtgtattgtctggttaagggataatgaagaacaaaccatccatgttgtatgtgtgaaggatagtttcaagtaagaatgtgacttgaagaaaataagagctatattagtaaaacaataatgttcaaaattaatatttatattgacatcaacagtattatattatgttcagaatgtaccctgatatggtgtgatgaagaggacattttacctataggattgtcatcctcaaaatccataaccccagtctaataatcagaaaaacttcagacaaattccaatcatgagtagtgagagaggagtctaagaaattacctgactaatactgctcaaaacttttgaggtcatcaaaaataaccaagaggacctagggatatatgacaagtaaatctaatgtagtatcctggatgggatcttagaatagaaaaaggcatgaatttaaaactaaagaaatctgaataaacattgggctttagttaataacaatgtaccaacattaactcattgattacaacaaatactaatgtaacatgctaataatagggaaaactggtagagggatatggaaacctgcattatcttctcaatttttcagtaaatctaaaacttctaaaaataatattaaaattatttatgttattagtaacaagttctgagtgtttggattgtccgtatgtttttcaacatatagtggaaatttattagcttcaatattgaaaataatgccatggagtggatggtgtggatttgtaattctgtggttgagaattgtgagaaaatcattcatttggtctcccccaatcatgaatagtcttcctttaaaaatgaccttctagtataaggtattatactgaaagcagagagaaaaatgaacataatttctttggattcttaaagcacagttacttctttctagttagttttttttttgtatcctaataaactatcagtggaaattatttgactcttatgaatggttatactgccacatgggcctgcatcatgagtggataaaattgctggtctggccgggcacggtggctcatgcctgtaatcccagcactttgggaggccgaggcaggcagatcacctgagttcaggagttcgaaaccagtcttgccaacgtggcgaaaccccgtctctactaaagatacaaaaattagccgggcatgttggtgggcgcctgtaatcccagctacttggggggctgaggcaggagaattgcttgaaccaggagttggaggttgcagtgagccaagattgtgccattacactccaacctgggtgacagagcaagactccatccaaaaaaaaaaaaaaaaaattgctggtttctcacactgtaaaaccttcttagtaacaaactgaatgacttgattatgttcacatcgttgtcaaattgcagaaatctgtgcaaaaatcccctgagaaagagctctcccttttgaaatgtgtcagtgaagatttagatatagatgtggatataattgtgaataaaaattgctacatataggttatctgcaatgttgagaaaaaggatgacatatcatttcaacccaattaaaatagcctctatctaaaagttactttttaaaagcatgttgatgacattttcaaataatatgctcaatgttttcttcaacctccacgtatattttccagagaagtacctttaaactgaaataaataatcccattgttaggtgacaaaataataaaaatacacttcagagtaatccaaaagtcaggaaacacagggaaaataaaataattttcaagggattagaggacacacaaggtcactacaaggacaatattggaagtcaaatggaagttagacccacaaaatgtccagggaagggtattctgggcttttggatcagcatgtgcaaaattgctgagctaaagtagcataatgatttcatgaaagtccaccaaattcattattacttaaaatatgattaaagcgaacagaataatagtgaattaaattagtgcttcttaggttaaatatgtgactcaaccactttttagctgtatgaagtgagcaagatatttgatctttctttgcctgagttttcaattctaaaattgaggcaaggctagcaataattctgtagcatcttgaggactacaaagttagtataaagagagcatgtagagaaatgcctagggaacttccaatttaggttaagatttagaaaattatagaagaagaaggtttttctaacaacgagaaaagtcttcttggttttaaaatccattcaagacctggcaaagcaaagacacttacatgaactgaaatctagaaatgtattaagagtccctgggctgcttttgatctcagagaagcagcaagagaaatgaatctgacattgaaggggtaagaagaaatgagccaacttttaatcaactttaaatatctacatgacagctcatgtactggcttagaatcctgaagatccccaccttcacaatcagtctgcatccacccattgactttttccagtgggccttcactgatggtacagaaccttttccagtatgaggccgagggcatgggtgaaaatctgagacatatctgaggaagctgagcaaaattcctttagaaaactttaggtcttcactgagtgcaaagcagaagagtccaaaggctgcagaggagcaggagagctgagtacaaccccttggaagtactctggaagttaccaaatacaagtagtaactgcttaaggctttaaagtaactgcttaaaactgagagacattcccttgaggtcagctgcacagcgaggctgattgaagctggggtagtactgagaaggtgcacctagggtgtgataatccaggagtagggctggagagaacttgaattttccagtgactttaagagctcatagcaagtttataaagcaattaaagatctcccacaatgtggaaaccagttgagtgggcttcagccaaaagaaatatctggagtcttgctggtgctaagttcccaagttctgatgaaaggaaagtcctgatttcaccctcagtggttaactgaatcagggatgtaaaaagcccaaatagagctcaaatttaggtaagatgaactcatccccacactggcagcctgacaaaagaaggagtgtactcatttctgggagaatatgttgttactttcagtcccaactcttctttgaacacagtgttcagcataaaatagacactaacaaaatgttgaagcagcaatgactttgatcatctaaaaaggaaacagtcaatagacacaaacctggatatagtacagatgccagtattattagattaaaaaaaatttaaataactataataaatattccaagaaatgtagcagaaaaggtagacaatgtgaatcaacacatgtgtgacatttcagcagagcagcagaagctataagaagaatccagtgtaaatattagactcaaaaatatgatgtaagatatggaaaattcagtccataaatttaatagtggaatggatggatgaatgagaagaatgaatgagtgaattttaagataggtgaatggaaattgtttaagctaaaatgcaagtaggaaatagagtataaaaatggaattgaatgcctgggaactgggtgacagtatcaaacagtctcaattagtgtaattagaatttccttaggagagacagaatgaggaagaagaatatttgaataactgatggcctatggtttttcacaaattaaaaagagacagcaggccaggcatgctggctcatgaatgtaatcccaacactttgggaggctgaggcgggtagatcacttgagcctaggcatttgagttcagcctgacgaacatggggaaaccctgtctctatgaaaaaatacaaaaattagccaggtgtgttggctggcacctgttatctcagctacttgggaggcttttgcaggagaattgtttgaacccaggaggtggaagttgtagggagccaagattgtgcctctgctctgcagcctgggtgacagagtgaaactccatttcaaaaaaccacacacacacacacacacacacacacacacacacacacagaaaaacagagagacagcaatctacagatctaataacttcaggaaaccctaagcagtctaaatacaaagaaaaccacactgtatgcgttatagtcgaaatgctataaccaaagatgagaagaaaatcttaaaagcagccagaaaatgaaaggcacacatcattagtaggcgaacaaagataagaaggacggctaactttacatcagacccaatggaagccaaaagacattggaaccacattttcaaagtgctgagaaataatacatgggaaaagtatttttctcaacagtggcgataagttctgagaaatgtgttcttaggcgattttattattaggtgaacagcatagagtgcacttacacaagccaagatggtatagcccagtataaacctaggctatgtgttatagcctattgctcctaggctacaaacctgtgcagcatgttactgtgctgaatgctgtaagcaattgtaacacaatggtaagtatctgtgtatctcaacatagaaaagtcaaagtaaaaaatatagtagaaaatataaaaaatagcacatgtctaaagtacactaacagtgaatcaagcttgcaggactgcaagttgctctaggtgagtcagtgagtgggtggtgaatgaatgtgaaggcttaggacattactgtacactactgtagacattataaacattgtctacataggctacactaaatttattttaaaaataaagtaattgtgctatgatgttacaaaggctatggtgtcactagacaataagatattttcagctccattataatcttatgggaccatcatcatatatgcaatctgtagttgactgaatcataattatgcattccaagatggtatgttaacctagaattctacatctagaaaaaatgagtattaaataagatattaaggcagacaaaagctaaaataatttgtcaacagccaacttgcactaagatgaaatactgaagaaagtgatttatgctgaaagaaaattacaccagatgaaaagctcctacatggagaaaaaaaatgaccaacaataagggtaattatgtaggtaaaaacaaagaactttttttgtgaaatacacatatgtgtttatttatctatcttttaagccctgtgcaaagattgtatataatggtgtactgtgagattcatagcacatgaacagtatcttatgtaatacttaatgaagtcctggaaaaataagagataccatttttggagcacctcctgtgtggcaggtaatgcgaaatgtaactttattcattttaactcaggtaatcctacgatagcccaattttttttttttttttttttttttttttgttgagacggagtctagctctgtcacccaggctggagtgcagtggcacgatcttggctcactgcaagctctgcctcccaggttcatgccgttctcctgcttcagcctcctgagtagcggggactacaggtgcccaccagcacacctggctaattttttgtacttttttagtagagacagagttttaccgtgttagccaggatggtctcgatctcctgaccttgtgatctgcccgcctcggcctcccaaagtgctgggattacaggcgtgagccactgcgcctggccaatagcctaaatattataacaaaccaaggctcagatgagtgaagtaacttggcaatattctacagccactaacttgcagagtgaggattttagctcttgctcccttgtatactaaaatgcataaataagattttaacattatttacatgaacagaagacagaaaataacgattttatgtataggaaactttaacaaattacagtgtttccatttaatggaatttggcagctgttaaatagaatggggtacatacatgtaagtgtgatgacctggaacaatattcatgacatataattttgaatggaaaaaatcaggttgagtataggaacctatatgtttccacatgcatatgtacatatatgtatgcttttatgcacagacataaacagatatacacacataaagaatatctcttaactatgtatagactactaatagattttaaatttcggaagacgtattttagaatttgtgagttagggattttttactgcactttatttattttttttacttcactttccgttagcactgtttgcacttttccacatactagggcttttttcaatgtaaaaatatccaagtttttaaataaaaaatacttttgctgatttattgcacaaaatttgaggatttacaatatgaacttattgggatagaggtcatattttatgtttttcttttctttgaacttgcacaattccctgataggtaggcactaatatttgttgaactttcaattaaaaggacgttggtcatgttgaagagcaaaatttcattgaactattggtaaaagagacaaacacagaagtaagtaggatggcttagaataacatgtagtgtgggagatgatatttgaacagctaattactggatgagtgctattctaggggctgggatacaaggtatatcactataggcagcaagaatggtacccacagagatggagagggagaaaagtacagctatgtgttggagtaatagaatcttttgggggaaataatgaactggtaaagtaagtggtgctgtactgtggagtggagggaagtgattgataacttttgaacaaggtgaacttcaaacataacatagcttcatagctttaggaagattaatccagcaagaagttcttcttcttttttatttatatttttttggaagcatgtttcgaagacaattcttttttctattacaaaggcttatttttttcattttctcttcttttatattctcccagacacctcacctatgttcttgctcaacttcttagttttttcctttctctcctctgctggcacttctgcccctgcctcgggtatgacagtaacagcccagagacacccacatgcttttatgagccactctgcttactcttagaacaagcattttcacacacttctgttgaatatatcatgtctcttttctgcatgacttttttttgaaacttctgtccacgtggacatgcgactgtgatgggaaacactgtggctctttaggggagaaaagcacccacaagactggaaaccaaaagagttttcaagcttctactctgcaaagtcacaggactgtgtttggaaagccaaatattctggttgagctatagtttctttcatcagcaaaaacaagataaccttaacgcctagaatacctctcacatcactactcttctcctcactgtcagttcacgggcctaacccctagtcactcttagtatctcagattattaatataccactgcctccagggagccttctctgacttcccatacctaggttactcctacctagctctcaaccgtagaattctctcattacactgaattgcaatggctggtttgtctatgttctttcttagactgtaaatttcatatggttttgtatcatatctttcatatttatccattatggccggtacctagcttagtggctagaaattagtagactgtcagtaaatatttgtcaaatgattgaatgaataatatgataagaatttatggtatttcatctttgtttatatgaaactaaatgcctcggaaattttgatatgcctttaatattttactgtattcttatacttctaaagcattttgctctccctcctcctgcactagaaagccaccgtgctattcgcttctgatttcacaatcgagtttgtaaaagacactatttgaatcaaatggatctctttagagttgctttttggtttgggttcatcaccatctgaaataaatatgaaggggaaaagggataatttgaggacactagtttaaaatagcctaattaacagtcttgataaagtgtttgaaaaaattacttcacattctttctacattttctacattctaattattctaaccttcattgtacaggaagatattaaagatttactaagatgaggttcagaagtgttgtcccagtagaagactgttaagaagctctcattgtcataagctctcattggaattccaaacagctcttctgtagcttctgtaaaattagctaatcatgctgttcttggattcccagttttggttctccatttcctgtgtacggtcctggaagaggctcttcactattggacttccctataaggttgagctcaaggagcctaagatggttgtccctccaaagagagggtttgcaggagcaactagaagtagtttgcccttcttctgcaaggctttttcaactgtgaaatcattttgacaagatgctttgtcatatgcttgacatctttttttcttttttaatgaggaagtgactgagagataatttaatctgaaatgctgccacctacgtagctagagattaattggatactgtctgaaaaattatttgagcacctcagagacagagtctaagtaaacagaaagtggtgttaataaagtagagacaaattatgactcttccccatctacttaaccaggttgttggcaaaccgctcctgtttctgagtatccttaaataggctaaaatgacaatttgatattgcagcaagtgtggattttacacaactaggatattgttgtctccttctagcacagttatgaatttggctacctttctcttggaagcttattttgtacaggaaggaaaacagtaatttaaccacaatggactttgttgaaaaacataatgctattaacgaagtaagtgtgtagtcttttcagctttgaaatttttcctcaagatctccaaaagatctttattttaaaatgtttctggatgtattcgttctttcttgtgtttctataattgaatacctgagactgagtaatttataaagaaaagaggtttaatcgttcacggttctgcaggctgtacaagcatggcaccaccatctgctcagcttctggtgagggcctgagaaagctcacagtcatgatggaaggtgaagcgagagcaggcataccacttggtgacagcaggagcaagagagagaggaggtgccatactcttttaaacaaccaggtattccatgaactaactgaatgagaatttactcatcaccaaggggacggtgataagccattcatgagggtactgccctcaggataaggtacctcccaccaggccccacctccaacattggaaattacattggaacatgagatttggagggaaaaatatccaaaccacatcaccaggatataactccaacagtgtagaacactgttattagaatggaagaaacagctaggtgtggtggtgtgtgactgttgtcccagctactcaggaggttaaggtgggaggatcacttgagccctggagtttgaggttgcagtgaggtatgatggcaccactgcactccagtctgggcaacagagcaaatcttgtccctaaaaattatttttgaaaaataaagtgaaacatgggaacaggacagtggtgggcattgtgtaggggcactcacatcccacactgacatatgtcagagccagtggcacagagtacacaccgtgtacatcttctatccttgggcagctgtgctctgaggaagcaaggggaaagttgaaagggatcttataaaaaaggcctctataacataaaaccttctcatataacaggaaatattataagtaaactccagttcatacatttttatgagcctatactttcaccagtctaaatttgttggatggaggaagacaggatatccctatatttatggagatcttgaagttaagttgatttttgctgaacatttctcttatttattatgaacttgatgagggaacagaaactatttctctactaaggaaaaatgtaaattccagctcaatgataaattgcaaatgacacttggcttcagtgttgggaaggcatgaggggacggtgggggctgtggcacactgggaatccagccatcccaaaggggagaccctactcagctcatgattgtcagcatcacacatgaacagggtataatactggcaaaatcttattattattattattgagacagggtctttctctgttacccaggttggagtacagtggtgcaatcatgactcactgcagcctcagctttctgggctcaagcaatcctcccaagtagctggggctacaggcacatgccaccacctggctaattttttaaatgtttgtagagatgagggtctcactatattgcccaggctagtcttgaactccgggccttaagcgttcctccttggcctttcaaagtggtgggattacaggcatgagccaccacacctggctccctattattttaagagaaagaaggcaaaaggttttcacttgaaatctcctgatcttaaagattgcctccccaaaacatgttatgtcacctgtgagatttcctcacttagatttttgccttgaaccctctctagctctgtatttgccactgcgtgatgtaaattttcagtgagcccttttgctctctcctagaacttgacctccacaatgctaaactgagtaccctgtcaacactagaagattgctcttccacctaatgttttctgtcagtcggtgatctgccatactccttgcaatgttattttcaaattctttagtattggtaggtacggtctgtattgtttctttataattgtctcaaaattagttttccctttctgtctccaccaagcacttacctaggggtactctcattaacttactcctgaactaatgcaatagctctgctgtttttactcattgcaggagagaaatttggtgtgctcactgtaggctagacaccttacaaagtgcttgggaaacaaaactgtaagccacgtccccacacacaggttcccatcctgctgtttctctttccaaatgcttgaatatcagatttgtcattctcagtttctatattgatcatgccctctagcaatatctataaatctctcttgctatcagatgcaacctaaactgtttagcctagtgttcaaggatttactctggctgtggtctgtgctttgcttggtcttcatttatcatagtgccttctggggacaaggggatcattctttcttagctctcaacttgtaccgccacaaaccccatccagtgtcagtcccttttactttcagccatcatcccctgatgcctgcccatacacacaagaacaatagaaaatgttgagttcttttctgtctgtgggaacttgatcatgacacaatttagaaccagaattggcaaactttatttgaagaaccaaatagtaaatattttaggttctgcaggccatatgacctctcttgcaactactcacctctgtggttgtaatgtgaaagtagccaaaccaggtaaatgaaagagtgtgattgtgttctaataaaactttatttacaaaacaggtggctaataagctgtagtttaccaacccctgatttagaatatcttcccctacctctgtgttcctgaactttctgctctctgatgcttcctcatcaccatcaccagaaactttgtttctgattacctgtggcactgccctctactgctgcgtacggtaatgggaaggttaccttcttaaaggtgacaatttcctggatggggccaaatgttattcatctttatatcctcgcattcagtaatattgattaaatgaaaatatgaagaaccatttgctctatgtcactgaatttcctagattttgacatttattgcaattccaatttctagatagaacttattgagagaagcaataaaagctgatgcagaacatattaaattcttgttatatttatgctattctttcttccacttgcatatgaaactcgatatagaaaagtatagccaaaataggtagaattttgtgaagtcagtaatagatggaggagaagtcccttgtttaagacattaaagtgagacaagacaaagctatttttaggatttttgtgcatgataggtacattgaaacccctaataaaaatattattcgtttttcaaattcagtataatattatcattattttcagataatatagtcttcagtaaaccagaaaaccccttgaaaataaatgaaaaaccgagtagaatttagtgcatggtctacttaaaaaaattgttgttcagaatttagtagttttaaggtacacaggaaattaacacttagattttgggagaaaagcctccatgtacaatagcaacaaaaagtatacaatacctaggagaagttcagtcagaaacatgtaaaaaaaccaaacacttcagacttcactgtgagattaaaaaaatagctgaatctttggcaatacaatggcaagtttttagatagggagatttggtattgtgaaaatgtcaattctttatgactacattgcaattccaatcaagataacaataaaatgttgaagtgcttacaaggataataagaaaatgaatccaagatagtatcatttttttcaatcatatcaaatgtataaatcttcatgtctaagggaaaaattgtattgctttttatagaaaaaaagctgtgctactacaaatacaaagtcaaatgacaaaaatatgcttgggtaatatttgcaaaaaaaaaaaacaaaacacaaagacaaaaaaaagaaaaatatccttaaaagaaagataaatacaaactacccaatagaaaattaggcaataaacagttcacatttaaaggaatagtcagtaatcatgtaaaactcaatcacatgactcaataaagacgtgaatattaaaataagacacactgatttgcaaagataaacaagtttgttaatgcccagtatactaagggtgttggtaaatgggtcctctcatagtctctttgtgagagtgtaaattggtgcaaactcatgggtaggcatttggctaattgcctaccaacatactaacatgcaagatgccacacaaagaatctaccaacatacatacatgcttaaaagtatttatgaaatgtacataaccgttaactcctcctaaaagtcaaactcccctcctggaatgatttcctacttatgtattagcagaggtacagaaagtattattacagtggacacaaccagaatgttcattaatagaggaccaactgaattatagtaaatctctattgtggaattaaagcaattaaaaaggaattagatgggccaggcgcgggtggcacaggcctgtaatcccagcactttgggaagccgaggtgggcagatcatcaggtcaggaaatcgagaccatcctggctaacaaagtgaaactccatctctactaaaaatgcaaaaaattagctgtgtgtggtggcaggcgcctgtagtcccagctacttgagaggctgaggcaggagaatggtgtgaacctggaaagcagagcttgcagtgagccgagatcccgccactgcactccagcctggatgacagagcgagactccttctcaaaaaaaaaaaaaaaaaaaaaaaaaaaaaaaaaaaaagggaattagatggttttgtagatgttgatacaggtataagacatcttcacaatgtaaagggaagaaagtacagcatatactgtacttaagttacaatttcccctgtataaattgttaggcattttgtatgcataaaattgcataagaattgttgagaaactaatgtcagtagttacttctagaaaataggttaggagaacgtttgggaaggtttgaaatttatatctgtccatatattttcagctatatttatatgctacttttgtaataaaaatctggttacaaataaggattttcaaacttctcctcgatcttctgcagctagagaaaggcaggataaaaattgcaagtctttctttttgtgtaagaaaaaatttgggggccaggcgtggtggctcacgcctgtaatcccagcagtttgggaggccaaggcaggcagatcatgaggttaggagttcgaaaccagcctgaccaacatggtgaaaccctgtcgctactaaaaatataaaaattagccgggcgtggggacacatgcctgtaatcccagctactcaggaggctgaggcaggagaatcgcttgaacctgggaggcagaggttacaagtgagctgagatcgcgccattgcactccagcctgggcaacagagcgagactctgtctcaaaaaaaaaaaaattgggggtcagttaggaacaacttcgtttctcattcttggtatcacttacagagctgtaatgaatgtcatctaaccctttacacattttcaacaaggtttcaatacctatcttgtggaaggcatgagttaggtagaggaacaggatagcttttgccttcagtgagctgatcatctatttatatcagtcatagatgattagttagtgatactttatgttttttgctattttggggggctttaagaatatcttggggacatatatggccattgttaccaaaaataacttgcaattaggccatttactttattgttccattttcttaaattcgaggaactagtgtacaatgtattcatgttctgatacatgtatccagaacttatgaaaatgttttgttgttaagtggtggtggattgttctggctttgtttctggataggcatatggacagttctcatgggaagaaggaggaaaaaataatctgttctcacctcttcccatgcagtagagggtagtgctaaagagagcagatgttaacaatagactacctggattcaggtcctggctcttcccctactcactgtgggaacttcagcaagttatctagtctctctgcaaatatgaaaataattgtatcgtagggtagtttggaggcttaaggacataaacaaatgttgcatactatttagtacgagtacatagtaagtgctcaataatgttagctaaaagtagtatttcttttgctgcttcattgattcctgattggttttgacttcaaagttggcagttctggttttcatttgtgtgacttcaggagtaaatgaatgtcttatgtacatgtggcagttgtgtatatgttaagcactgctgaagagtgttctttggctgaaagatctagtcatgttacaatgtttctaaatttatttatgaaataagtgaaaggagcaaacaaaggtcaagtctcagtggaagagaccttgagatcctccttctctgtaatggtctgttcactggtctgtctctgttagaagtagaggcttctcagaaataaggactgttacacttgcagtatcaagcacaagacctaatgattagtaaatatctcttgaattgaatacgttctgtttcttttattagtattattattattactatttatcttttgagatggggtcttactctgtctcccagtcagtagcgcaatcatagctcattgcagtctggaactactggcctcaagcaatcctttggcctcagctacctgggtagctgggaccccaggcatgtaccaccaagctcagttaattttgtatttattatttatttattttatatttatttgagacagggtcttactctgtcacctaggctggagtgcagtggtgccatcacagctcactgcagcctcattcttccggggctgacttccacttcagcctcccaggtagctgggactacagatgtgcaccaccattctgggctaattattatattttttgttgacacggggttgtgccatgttgcccaggctggtctcaaactcctgggctcaagtgatttttccccttggcctcccaaggtgctgggattacaggcatgagctgtggctcctgacccattattattgtttttaattcacacatcataattatacatattagtgggatacagtgtgatatttccatacatttatacaatgtgtaatgcccacatccatccgtccacattagcatttccatcacatcagacattatcatgtctttgtgttgagaacattccagatctgctcttctagctatgtaaaaatatacaataaattgttttattatagtcatcctatagtgctgtagaacactagaacttattcttcctatctagctgcacttttatatctattaaccaacctctggctatcttcccacccactacccctcccagccttcagtaaccactgttctattctataggtctaagagattaactttatttgctcccacatatgaatgacagcatgtggtgtttatgtctctgtgcttggcttattttacttaacataatcttctccaagctccatgttgccatgaatgacagaattttattccttttcatggctagatagtattccattatatataccacattttctgtagcccttcacgcactgttagacaattacgtggattctatgtcttggctattgtgaatagtgccacaataagcataggagggcagatgtctctcggacatactgacttcatttcctctggatatgtggcccatagtgggattgctggatcatatggtagttctatttttagtttttttgagaaaactccatgctgttttttgcagtggctgtaataatttacattccaatcaacagtgctgtttctattgctttttaaactcaatcttactctttgccttctaaacccttctgggttgttttgaaagccacgtgcaggggagctcagagtagttgttgtgaagcaagtacaacatcaaatattagttaacactcacacactcctgtgggccagacactaatcccagtgtatgatgtgtattaatttatttaattcacaagttggctgtatgacgtaaaatgtgtaatgatccattttggccatggggaaactaactctcaaggatatcaagatgtcaaataacttgtggaagcacacacacatagctagtaagtacagaacaagaacttgagccctggctaagtatatgtttctagccatccagcaatattgctctttacttccaaaaagtcagcagatacctacctacctacctacctagagagctctgtctttcctcattaacttcttgctcttctcctttgaaaacttttcccacattctctgttatgacccctttcttcccatagtaggtagattttgtaagatattaaactcaacttctggtacctttgaagtatctttattatacctatgcttcattgctcgcagagagccttcatggcaaaggaaacattttagcttccatgcaaaagtgtgctttatctaaataggacttacccactcatctaaacactggtcctccttcctcctagtggatatggcgggaaacagaggaaaatgttttttccctattcctgatttcctgggagacacttttatcccaacattcctggccttactgtactctctcactcttcccacacactcagctgaggacgaactcagctgataagaaatgtgagcagaataaccttgcatgctctgctgagggaccgtcttttttctctgtctgcagaaagaaggactttgctgctttgggccaggatctgaacttaggtgtaaaccattgccctggcagagggaacctacccagtccattgctgcctgctacaaggtaagtgaaatcgatctccgtctacccattctccaggccaattttcatcagtactcagagtgatcaaggctttcataggctgattcttttgtcttactcttcatttgtccaaaattcatctgagaagactaacacttcaatattatactgcttaagaaatgtaataatcctgacagcttagcattgcaagttcctccatttacaggtgaagtaactgagattcaaaaacatcaataaacttgcacagcttaagactgtagctgaactgaagttaggccacagatttagtatttttccagtaagggaaagatttttgcaaggaaaaaactaatattaaaagcaaaatgctctcaggaattgtttcttttaatatgatgaaatactagaaatatacaattggtgaagttattcattgctgatatattagtacctttcatgtagattcacacaggttgaccaataactgttctcaggcaggtctccaggatctatctggaggatcctaggttcctattagaagaactgtgtgttttgttgctaaactagacacaatagaccaggcttcacttggcagattgccactttttatcaaaactctatcagatgaatttttctaaaaaattatacatcctttactaaaaatatttttgctaaattaattgtgggaagatgttcttatcgcatatttatgagatgaacatttatttatattgtttcttgaaaactttttaaaaataatagtattaaaatatattgcataggctgccaagcacacaatagggatatcaaaagcagtaaggctgataaaagcaagagttttgtgtttaattagtaggctctgactgagcagaaaattaaaatcccctacttggaactacctataaggaagaatgagaattcagaccctaggcattactgatgctcagttgaaggcagcttgtcaaagcactgctttttattaatgcccaatagttcttaaatacaaactatatacaaatggtaaaactatacttctgcccagttgaacctgatgcaggaaaggcaggtctcaaaattggggcttagcccaggagggttcttggctttacacaggaaagaattcaccaggaaagaattcaagggtgagccagtaatatgagacagcaatcttttattgaacattactactccttgcagaacagggctaactcacaggcaatgtgcccagatttggtaatgtatgggctcttggcaactgtatttatacttacttatattcatttttaattacatgtaaattcaaaggcaggttaattcaaattgagggatgcattatttagaactttctaggaaagaagtggcaacttctgggtcatggctgtggaatggggtgataacttcctggttgttgctatggtatttgtaaactgccatgatgctagtgggaatgttttatgctaaagagcaatgagagcagctagggatggctttcattgccgtctgctggttcctgccaatttgatttcttcacttcattgcctagggaccaaatcctgttttggtcagcagggttgtgaccaaaaaacaagtcctaccaatctcctacctcaaatccgtactatgtgcacttcagtagacaacttaatattgaatatatgtgtgaagatacgtacataaaaaaacacctaaacctaaacaacttagcaaaaatgtgtatatagttcagactttttttttacacatggcttgcttttattttttgtttattttttatgttccagaatacatgtgcaagatgtgcaggtctattgcatagttgaatatatgccctggtggtttgctgcacctatcaacccatcatctaggtattaagcccagcatgcattagttcttttccctaatgctctccccaacccagccttccctgataggccccagtgtgtgatgttcccctccctgtgtccatgtattctcattgttcagctcccacttacaagtgagaacgtgtatgtttggttttctgttcctgcattagtttgctgaggataatggcttccagcttcatccatgtccctgaaaaggacatgacctcattcctttttatggctgcatagtattccatggtgtatatacttcatctctttctccctctggagaatcattcttccataagaaaaaaatgatatatttgacctggttcctttgggtcttcctttccagtcatccttgtattgaagaattctttaacatttttcagcactctgttgtacatttctgactgtactaagacagtcccttcctcatatcccagcttttattccaatggataatgaaattcttgaactctatgcttacaacttttcaaaattcacatattgagtacagggttcaagtgtttggttgcttcgaatattgtaattgtttccatcagttgtgaaacccacaaaaaggagggtcacaccaatatccttagaattgaggtcattgaaatccatgtaggcatttgggtcttccccacattaaagcaccaactgttaggcaaaaagccaatgtcaaaagagcaggctggcatgtggacctcttgctttatctatcttccctctaattagctttccttttagcctacagtccttctctccactccttcaagtgcaaattcagctacctcttctttgagccactctctcagtttaagccctaaaatgcttctgtttacttcttcagacctatactgcagtgggatttatgctctctgaagttacagtggaatggagattgggtgtggcttaagcacaggtagttcacatttgagagccagccttcctctctttgaacagggtcctgctcctcaccagctgtgagatctcaccctagttacttaaaacagtcagcttggctttccccttatagaatggggatggtaataacaattgctattgtgaggaagaaatcatcaaatccctataaagtttccagcgtttagtaagcactcaatatatattagttattattactgttattgttcattcctgcacaccccatcttgattttctttcttctattcaaaggcaagcgtactcttttctagaattcatttcatatttccttctccctacttttagcagcctataaagtaactagaattacaggggcaaaggggtagaaagcatacctactatcattgggaggccagagggaccaggaattctgtagcaacttctctgttcctggtatctaaagcttaagtctgtgctatgttgaaacctgaggacagtcagtctctttcattggtttatctaaaataatacttttacgactccttattggctgacgtctctctatttatttctttttttcttgaacatatagatgcagaaatgattgagggggcaaaccagatgaacatggcataatggtatcatctgagtatagtctggcaggaactggccactggatggatattatgaaccccattttacatgcaaaaaatcaagatttggagaggctaaaccaatcgcctctgtaaaattccactcctatacttgccagttttatgagtttatttaatctctgtaatcccaagtttcctcatttgttaaatatatataatatctatcttgcagattattttaaagactgaagaagataattgtacaataactgatataatatctatcatctacctatttatacaggaaatatctagtgtatgctagtaattctagtgtgtgtgtgtgtgtgtgtgtgtgtgtgtgtgtataattatatatattatacggttgtatctccaatgacaacctttgtctcattcatctccagattataccaggaactaatcttaggcaatttcttgtactgatatcttgtacttctccaacatggatgatatattttgaacataactttatacaaatttaatgtatataccatatgtatacagtctgaaggtttttaaaaagaattttgttgtttttaactttctgcagttagggtcctctttggttgcatgtatgatgttctctgctgaggagagctgctaccaaatgcatttccctacctcaacaattgcctttggaaatctcactttcccagccagtcctcctatgtgtatatgcatacacagacgctaaactagacctcttatgcttatagtaagaagtattttaggttggatgcatggtaaattaactagacagacccagaaaatacagttgcattgatattcccaagtaggatctattgaaaatagtaaccagaactatgtttctggaaagtaaatttagagagacatgttattttaaggaatgccaaagagggacagcatttttggaagatcgttgctggtggatggtaaggattagcatggcctttctttttatcatttgggttaggcaccccacatcctgattttgaaattactcttcattttattcagtgctcttcagagactgtaaaaagattgattaatattcattcaagcttaattggctttggaaagaaaaagtaagtcaattaagtacattagtaagcagtttttcatgaagagtaataatggcagagggtgacggggcagcacagcaccagagattgggggtcactgagccccataccacactgaggatgttggtttcatgtctctctttgtgcttctttcatgttctcactcttttgctggctcataagcaatctgtttccccagtacgttacttggatgaagtagaagtagatcatactatctgttccaaggtcttcctttccttatctgcaagttactctcttgaaagaataacgaaaggttgagagatctgtactcactttttatgctttcgtttctttcctgcctcctctctatttcacagaggtgataaaagagaggtaaaatgaagtataaagccagggaagactaacagtggtgaaacctggtaaggaatgaggccattgccaataatttgagaagatcagaaggagaaactgagtatgggtgatgtgaaaattatttaaaacaattaagacagtacaggcagcaacaaatcggagtggacatggctagggggcagggatctgccatgtcactcattagatctccagggggaaagttatacagtgtctcagcatatgaaccagggcacctgggcagcaagagaacaattatgaaacctgagcaaatcaacagctatttattaaccaatataaacccttaaaataataataacagtaacttactaacaataatttaccagttgctatggctagacccatgtatgacaactgaatatcagccctagagctgcaaatggagccacactgaggtcctagtagcgggaactgacagtcaaagacagatattgagcattaccaattttaggaattatatatttgctttattcaactttttgtttatcatatataagtacatatcaaggcattttcctggtggaactaagacaaaatcttgcaagttgttactgtgaataataattcaatttgtaaagatgtctatgattgagaggttttaaaatacctaccatattgaatatgagtgttactcacatgcactcttgggttttatgatcactgtatttatttttaaagtaacctagtaattgcaaaaataacttgcaaaaaatggtttatttcataaaaagtaaatttgatttcaataaaattaaatttctggataatgaatcctacatcttttcgtgtgtgtgtaatctaagcgttctcaagggcagttggatctacagaagaccacaactttgctttattaataagcaaaatagggaaacataaaccattaagtatagactttctgagagcttagcagaaaactctctctcttactgattaataaattgttcatcagtgctgtaatggacattaccttactatcatgaactggaatgtaggtgtctggcaaagcctgatatacttttgtgtgtaaattaatttttaagacttttgtttaaaatgtatcatttctcccttattcttttacggaacagttagctaataaaactttaataaatgagtactagattctgggcatttgcaagttactatgcggttatacatctgacctactttgtttgatcttcacctcctttatagtatgctataactgttttatttagcatgcttcctttttatttagcgtgcttccttatatgtaggtcctcctttcctagtaaattaaagactcttgcagtcaggaaccttaatttttataatcttgttagtgttgagcaatgtggaagatgcttgagaactgtttgaattgaatttcattcaaggctggtatctttcagttttgaaaggtagaagtgcgtattggtaagttactagaaataaagggtgaatttcttcaacttgataggttacttctgacgatttcatgatttagaagggatttggcttctggatttaggagatcattcggtgctatttcatgcctttaaggaggtacagagaaaggaatgttattcagcctgggagaatatttccaacaggagggtcagaactgggctttcacaggggatagtatttgaaaataggtgtaaaaagatatttcaggcagagggaggagctgtttatgaccttattaattcagtaagcacatattgaacacttactgtatgttaggcaaagaaaagactgttgagataagcaagattacaagaagtagttttaaatagcttggaggttggagttaaacttggaaaggttgactggcacttgattgttcaagactcagtaaaagattatattttctaaagagagattcaacaatgtttctcatcccatgtgctcttcttgaactcggtgccaccaacacgaccatcaggaggtagaaatccgcaaaaggatcttcacttaggcacattgtcatcaggttatccaaagttaagacgaaggaaagtatgttaagagctgtgaaacagaagcaccaggtaacctataaaggaaaataaaggaaaacctatcagattaacagcagatttatcagcagaaaccctacaagctagaagggattggggccctatcttcagcctcctcaaacaaaacaattatcagccaagaattttctatccagcaaaactaatcatcatataggaaggaaagatacagtctttttcagacaaaccagtgctgagagaatttgtgactgtcaagccaccactacaagaactgctaaaaggagctctaaatcttgaaacaaatcctggaaacatatcaaaatggaacctctttaaagcataaatggctgtgggtttgtcatagatagcttttattattttgagatacatcccatcaatacctaatttattgagagtttttagcatgaagggttgttgaattttgtcaaaggccttttctgcaacacatatgtttattgcagcactattcacaatagcgaagacttggaaccaacacaaatgtccaagaatgatagattggattaagaaaatgtggcacatatacaccatggaatactatgcagacataaaaaggatgagttcatgtcctttgcagggacgtggatgaagttggaaaccatcattctcagcaaactaccgcaaggacaaaaaaccaaacaccgcatgttctcactcataggtgggaattgaacaatgagaagacttggacacaggaaagggaacatcacataccagggcctgttatggggtggggggatgggggagggatagcatttggagatatacctaatgttaaatgatgagttaatgggtgcaacacaccaacatggcacatgtatacatatgtaacaaacctgcatgttgtgcacatgtaccctaaaacttaaagtataattaaaaaaaaataaagtaattaaatcccgaaaaaaaagcataaatgacacagaacttataaaacaaaaatacatgttaaaaagaaaaaaaaacacaaacaacaacaacaacaacaaagtacacagacaacaaaaagcatgacgaatgcaacagtacatcacatttcagtactaaccttgaatgtaagtggcctaaatgcttcacttaaaagatacagaaacacagaatggacaagaactcaccaaccatctgctgcctttaggagattcacctaacacataaggactaacagaaacttaaagtaaaagggtgcaaaaggcatttcatgcaaatggacacgaaaagcgggcaggggtagctattcttatttcagacaaaacaaatgttaaagtaacagcagttaaaagagacaaagaggtacattatataatggtaaaagaccttgtgcaacaggcaaatatcaccatcctaaacatatgtgcacctaacactggagctctcaaatttataaaacaattactaatagacttaagaaatgaaatacacagcaacacagtaatagtgggggacttcaatactccactgacagccctagacaggtcattaagacagaaagtcaacaaagaaacaatggatttaaactatagcttgaacaaatggacttaacagatacatacagaacattttatccaacgactgcagaatacacattctgttcaacagcacatggaactttcctaaagatagaccatatgataggctataaaactagcctcaataaatctaagaaaattgaaattatatcaagcattctctcagaccacagtggaataaaactggaaatcaactccaaaaggaactttcaaaacaatgcaaatatatggaaattaacctgcttctgaatgagcattgggtcaaaaccaaaatcaagatggaaattaaaaaattctttcaagtgggctgggcgtggtggctcatgcctgtaatctcagcactttgggaggctgaggtgggcagatcacgaggtcaggagaccaagaccattctggctaacacagtgaaaccctgtctctactaaaaaatacaaaaaaaattagctgggtgtggtggtgggtgcctgtagtcccagctagtcaggaggctgaggcagaatggtgtgaacccaggaggtggagcttgcagtgagctgagatcgcgctgctgcactccagcctgggcgacagagcaagactctgtctcaaaaaaaaaattctttgaactgaacgacagtaatgacacaacctatcaaaacctctgggatacagcaaaggcggtgctaagaggaaagttcacagccctcaatgcttacttcagaaagactgacagagcatgaactgacattctaaggacacatctcaggtaactatagaaacaagaacaaaccaaacccaaacccagcagaagaaaggaaacaaccaagatcagagcagaactaaatgaaattgaaacaagcaaacaagaaaaatacaaaagatacgtgaaacaaaatgctgattctttgaaaagataaataaaattgatagacaattatcaagattaaccaagaaaacaagagggaaaatcaaaataactttgttaagaaatgaaacaggaaatattacaaccgacaccacagaaatacaaagcatcaatcaaggctactatgaacacctttacgcacataaaccagaaaacctagaggagatggataaattcctggaaaaatacagccctcctagcttaattcaggaagaattagatactctgaacagaccaataacaagcagtgagattgaaatggtaatttaaaaattagcaacaaaaaaaaagtccaggaccagatggattcactgcagaattctcccacacattcaaagaagaattggtaccaatccttttgatactattccacaaggcagagaaagaaggaaccctcgctaattcattctgtgaagccagtatcaccctaataccaaaaccaagaaaggacataaccaaaaaagaaaactacagaccgataaccttgatgaatgtagatgctaaaatccttaacaaaatactagctaaccaaatccaatagcatatctaaaagataatccaccatgatcaagtgggtttaacatacacaagtcaataactgtgatacaccacataaacagaattaaaaacaaaaatcacatgatcatctcaatagttgcagaaaaagcatttgacaaaatccagcttccctttatgattaaaactctcagcaaaatcagcatacaagggatatacctcaatgtaataaaagccatctatgacaaacccacagccaacataatactgaatgggaaaaagttgaaagcattccctctgaaaactggaacaagacagggatgcccactctcaccactcctcttcaacatagtactgaaagtcctagccagagcaatcagacacaagaaagaaataaagggcatccaaaatggtaaagaggaagtcaaactgtcactgtttgttgaagatatgatcatttaccttgaaaaccctaaagactcctccagaaagatcctagaacggataaaagaacttggcaaagtttctgaatacaagattaatgtacacaaatcagtagctcttctatacatcaacagcgaccaagcagaaagtcaaatcaagaactcaaccccttttacaaaagctgcaaaaaataaaataaaatacttaggaatatacctaaccaaggaggtgaaagacctctacaaggaaaactacaaaacactgctgaaagaaatcatagatgacacaaatggaaacacattccatgcttatggatggctggaatcaatattgtgaaagcaaccatactgccaaaagcagtctacaagttcaatgcaatccccatcaaaataccaccatcattcttcacagaattagaaaaaaaaattctaaaaataatatgaaacaaaacaaaacaaaaggcctgcatagccaaagcaatactaagcaaaaagaacaaatctggagacatcacactacctgatttccaactatactataaggccatagtcaacaaaacagcatcgtactggtataaaaataggcacatagaccaaaggaacagaatagagaacccagaaatgaacccaaacacttacagccaactgatctttgacaaagcaaacaaaaacttaaattgggggaaaggacacccttttcaacaaatgctgctgggataattggctagccacatgtaggagaatgaaactggatcctcatctctggccttataaaaaatcaactcaaaatggattaagtacttaaatctaatacctgaaactataaaagttctagaagataacattagaaaaatccttctagacattggcttaggcaaggattttatggccaagaacccaaaagcaaattcaataaaaacaaaaaatatttgggacttaaactaaagagcttttgcacagcaaaagctttgtcagcagagtaaacagacaatccacagtgtgggagaaaatctttgtaatctatacatctgacaaaggactaatatccagaatctacaacaaactcaaacaaatcagtaagagaaaaacaaaaaaacaaacaatcccataaaaaagggggctgaggacatgcataggcaattctcaaaacaagatatacagatgaccaacaaacatgaaaaaatactcaacatcactaagatcaaggaactgaaaatcaaaaccacaatatgataccaccttactcctgcaagaatggccataatcaaaaaatcaaaaaacagtagatgttggcatggatgtggtgaacagggaacacttctacactgctggtgggaatgtaaactagtacaaccactatggaaaatagtgtggagattccttaaagaactacaagtagaactctcatttgatccagcaatcccactagtgggtaactatccagagaaaaagaagtcataatatgaaagagatacttgcacacatgtttatagcagcacaatttgcaactgcaaaattgtgggaccaacccaaatgcccatcaatcaatgagtgtataaagaaattatggtatatttatatgttgcaatactactcagccataaaaaggaatgaattaatagcatttgtggtgacctggatgagattggagactattattctaagtgaagtaactcaggaatggaaaaccaaacatcatatattctcactcatatgtaggagctaagctatgaggatgcaaaggcataagaatgatacaatggactttggggacttggggggaagggtgggaagggggcaagggataaaagactacaaatatggtgcagtgtatactgtttgggtgatgggtacaccaaaatctcagaaatcaccactaaagaacttactcatgtaaccaaataccacctgtacctcaataacttatggaaaaaataacagtttaataagaactaaaaactctttatcagctctgtattttgagaaaattactgatttctttgcctttgtttcttcagctttaaaattagggctcatataagttcttgcctcttagagctgtgagaactgagtggaattaaggtgtagaggaatgcttgaggcatattgttcagtaactgtttcctgggatgatgatgatgatgatgatgatgatgatgatgatgatgatgatgattgatatggtttggctttgtccccacccaaatctcatcttgaattcccacatgttgtgagggggacctggcaggaggtaattgaatcactggggcaggtctttcccatgctgttcttgtgatagtgagtaagtctcatcagatctgatggttacataaaaacagaagtttccctgcacaagctctcttctcttgtctgctgccatgtgagacatgcctttcaccttctgccatgattgtgattctttccccaccaacttggaactgtaagtccaataaacctttttcttttgtaaatggcccagtctcggatgtgtctttatcaactgcatcaaaatggaccaatacagtaaattggtaccagtagagtggggcactgttgtagatactcaaaaatatggaagttactttggaactgggtaacaggcagatgttgtaagagtttggagggctcagaagaagacaggaaattgtgggaaagtttggaacttcctagagacttgttgaatggctttgcccaaaatgctgatagcagtataagacagtaagttccaggctgagttggtctcagatggagatgaggaacttcttagcaactagagcaaaggtgactcttgttatgttttggcaaagagattggtggcatttttccccatcctagagatttgtggaactttgaacctgagaggtatgtaaggtatctggtggaagacatttctaagcagcaaagaattcaagaggtgacttgggtgctgttaaaggcattcagttttataaaagaaacagagcataaaagtttggaaaatctgcagcctggcaatgagatagaaaaaaaatctcattttctgaggagaaattcaagccagctccagaaatttgcataagtaatgaggagttgaatgttaatcctcaagacaatggggaaaatgtctccagggcttgtcagaggtctttacagcaggccctcccatcacaagcccagagacataggaggaaaagatggtttcatgggccgggcctgctctgtgcagcctagggacttggtatcctgtgttctagccactccagccatggctaaaagagccaagatacagctcaggctgttattttagagggtagaagccctaagtcttgacagcttccacgtggtgttgagcctgtgtgtgcatggaagtcaataatggaggtttgggaacttctgcctagggttcagagaatgtatggaaatgcctggatgcccaggcagaagtttactgcaggggtggtgccctcatggacaacttctgctagggcagtgcagaagtgaaatatggggtcagagcccccacacagagtccctactggggcactgcctagtggagctgtgagaagggggccatcgtcctccagaacccagagtggtagaactacagacaacttgccccaagcacctacaaaagccacagacactcaatgccagcccatgaaagcagccaggagggggctgtaccttgcaaagccacagggacagagctgcccaagaccatgggaacccacctcttgcatcagcatgacccagatgtgagacatggtgtcaaaggaggtcattttggagttttaagattagactgccctgtttgattttggacttgcttggggcctgtaccccctttgttttggccaatttctcccatttggaatggttgtatttacccaatgcctgtgtccccattgtttctaggaagtaactaacttccttttgattttacagtctcataagcagaagggacttgcgttgtttttgatgggacattggactgtggacttttgagttaatgatgaaatgagttaagactttgggggactgttcagaaggcatgattggtttcgaaatgtgatttgtgaagggccaggtgtggaatgatatggtttggctatgcccctacccaaatctcatcttgaattcccatgtgttgtgggagggagggacacagtgggaggtaattgaatcactgggggcaggtctttcccatgctgttctcgtgatagtgaacaagtctcatgagatctgatggttatataaaaacaggagtttccctgaacaagctctcttctcttgtctgccaccatgtgagacatgcctccaccttctaccatgattgtgagtcctccatccccacccacgtggaactgtaagtccaataaacttctttcttttgtaaattgcctcatctcagttatgtccttagcagcagcatgaaaatggactaatacaatgatgatgattatattcttgataataacagtgaagatgatgaaaacataaagatatcaccttcatatgggttatgtacctactgtgttatattttcattgatatgtttatggccctgtttatgtgaatagactaaaactcatggaatttaggaaactggtctcatttatttttgtatatcaagcagagctgtgcttgctggactgttaaaagaataggctgttgagttaaaaagttaaaatctgctttggacttggggggcttaggatgccagagggtatccctataatttataaagaaatttctgaaaatgtgagctttgtgcttatgagaaaatcagagatttaaataattgaagtcacaattggagaaaatctctgtggtataggactgattagaatacaaggcagaattcagtaattatttcaagcacagagctatggagcctgaggcagaaaatattaattctgactgggaagacggaggaagagttcacagggaaggtgacaccagacaagcttctcctttaaattttggagtctttggaaatgactagtaattatattcaaattaatttcccaaagaaaacaattaaattggctctccaaagttattcttcagagaaaaaagaggtgaggctatgcattttccatttaagaatagttactaactgaatataggagaacaattatgaagctaggtggttctgtacagtgaaatatgggaccttgagctctgtatttcagtattttccagaatttgggtaaattatcatgaatgtcagaagttctcattaaaatgtaaataatatgtttaagtgccaaatttgaccataaaggaattctttgtgtttttcattgaactacatcactagatctattctggtcatgctttaattatttttggttttgttatttgcaatttaatacttgtaatattcttttctatggtttaaattaaacagtgactatatgtctttggtctttaatctcttcctcaactcatgcaagtctagcttctacacttattattctacttcaagcataatcaccaataaactcctatttataattccagtgagtacgttcttacgaaatcagccctagagcttattagcgaagtgcttttgacatggtgggtgttcaacatataattattgattacgtgagtcatgaatcaaatatcaaattagctctgttctaatcctagatctatctctgactagttatgttgttaaatgggatatgttactcagtctttcaatttcagtttttcgtctctttacgtattctttaagcttatgattcagctgtgtattgtgagatgataacttggaaaaaaataaaataactttgcacaaattgtaagcagtagggaagactagaagaagcaggaatttatttagaaacaactgttccaaataaatatactggatacacagcaaaaagactaggtctgtgcctcatcctatgtaaaatgcctccatcctaacagacatttattgactatcttagccaggtattacagtgataaggaatttgtcactttacctcaaaccacaaggtcttcagaatcaagagctagtattttactttcttgatttagctaaaccatccagtgaaaatgtgcaggggaagagtgaatatatttagttaattttatttattgagaagtatttattcttgttaccctcccttctgggatatgttacagcaagaacaggtgttttttttaaactagtgagtaattactgatcttcttatagtcttacaattatttaaataaatgctatcaatgagaataaccaataatatgctatttctgtttatataaagaggaaattaacccagaatttctatccaatggcatccatgcatgtgactccaggataatctgtatataaaatacttgcaaatgtttccctcaaggtagagctggagttgatttctgtgtgataaccccagccaagaagctcacaaacttctggaatcatgtgaaaccgtgtattaacatagaaatgttgatactatagctatgtagcagataggaacagtttttaagaaggcaaggtcttccaaacattatttatgatattataatgcctatagaataatagtaaatgtttttcaatgtttgggactatattcagtacataaaataataggtgtctttttaagcattaattttgcttagatatcgtgtatgctgggttttattttcttagtcaacaattaacaagttttaagggccaggtgtgttggctcacgcctgtaatcccagcactttgggaggccgaagtgggcagatcacctgaggtcaggagttcgagaccagcctggccaacatggcgaaaccccgtctctattaaaaaataccaaaattaaccaggcgtggtgacatgtgcctgtaatgccagctacttgggaggctgaggcaggagaatcgcttgaacctgggggacggaggttacagtgggccgagatcatgccactgcactccagcctgggcagcataagactccgtcacaaacaaacaaacaaacaaagttttgagaagtaaaagctatttaccttacctttgtgtaataattcctgagatataaaagaagctgtagttgacatttaagattgattctccagtatctatcctacttccaaattgttagtttaagccaaacatcataccccattttctctaccaaatgttggtttagaaaagagtatgtgtggtagtccaggcctatgagacataagccagaatcaactggtatcttctacagtgttttcttgttcagtagaaggagaattaggaagacactgtctcctctttttcctcttggggtggggacatgaaaatgctgtagccgtcttgtgaccatcacagagaggctaatggcacaactagcagatggggagaacctctatctttagtggcatcattggattggaatgtacctggagcagatactaacccctcagatttttttttttttttgaggcagagtttcgctcttgttgcccaggttggagtgcagtggtgccatcttgggttaccacaacctcagcctccccagttcaagtgattctcctgcctcagcctcccaactaactgggattacagatgtgagccaccatgcccagctaattttgtatttttagtggagatgtggtttcttcatgttggtcaggctagtcttgaactcccgacctcagctgatccgcctgcctcagcctcccaaagtgctgggattacaggcatcaaccaccgcggccggcccagattcttataatgtgaaataatttcagctagtctgaatatggttttgtcctacctgcaattgaaaacctcctaataaatgcagaatagatcatgaaacattaagggcaagatagaatagtctaaaagaacaaaatgagactacagcaacgacagaaatagaatattgaagagagaaacacctctataagggaagtagaaggagctatccaagggttaaagaaaagtaccacaggcaaagaattgaaaagccttcactgctgagcagcctcatgtgttcttttgttctgattcatgtacgttaagtcaaggaattggggagaagtattaatcgaattgattgcatgtcgtcttattttattaacaactgtgaagaccagctagagccatggaaattactttctaatactaccaataatttgaaaattaacatgtagagtaaataagtcatctgtagctatgcagtactggttattgtttccagttttcttgtagttgtcatcttgtagtcctatttaaaactaaagcattataaagctgagatttataattcgctgttgcagctttgttactatgtaactgaaagtaaatgttccttttccctctggtgagattaagtttttaaaggattgaaaaacaaaagtatcaaatgtgatttctgtggttatttttctccttaaaaagtaatttttgaaaagattagatatgtctcttccatttttgtctttagtttgtgaaatgatttcaactatgaggaatttaaaaaataaattaggctcacttgtttgggagtgggacaaaattatataaagagaaaggtttggggacgttttgccagaaatataacaaattaaacatttattttaattaagtttaatcgtacaaagtacagattaatacttattttcagatttacttcttgatagaaaggaaacatgtttcacgggaaattgagatgaaaagtgcagaagataaaatcctaccattgtcaaatgaatagatccggaaagcaaataagctttttgtaaggtgatagaaattataatgaatgagcactttgaattttattccaagtacatttaaaattcacttgtttaaaaagaggaatctggtaggaacattaattgattatgatgagtgtggattggagagatgaggctgaatggggaggatgagggttgttgttctagatgagggtttagactaagctgttggcatggcaaccagatggaaggcaacagcctagagttgaaggattgcctgggtggacgggcactaggatgggttaagagagaaacaggaacccaggaaacaggcagtccaacaggggcatgtttttggtgaaaaccacagttcactcttggatagccagactgtaatgtaaaaattggactgtcaagtcctggttttcaagctgcaggtcgagttcagggctagcagtcagaggagagtggtcagagaaatgggggaaccatctgagctctgaggatagctcaagcatttaaattcagttaaacaaattttacccagtgaatgcctagtttatttaagggatctcctaggaaggtggctacaagtagggcctgtgaagcagccgagacctgggcctccagatcctttctctgacccccatctccttctcctttgatgactctaccactgtttgccaagaacttcagtgttgttaggagcacttggaacatttattcttgttggaaacttatagtcagtttgcttttttacttcattccttccttccttgtaccctttcttcttcctcccacccttctttttcttcctcctccctctcctgctttctctcactctttatttcttctttctgttcctttactgtgaacattcttttcccactgctttgttttcttgaaggtataaccctctaagaaaactagctttatgtagaggctttaattccaaattcatattttgtgtagttttaagggttaccctctttcttgaaaaaaaaaaactgttagaatcaagactgttgaatgatcagagtggccgatggcccaggttatctgtgggttttgggcctgcttggtcataagctctcccatcattcttggggctggtggtttgtctccctttgtgctaaagcaagccaggcatgcatttgagagatatatgttctcatgcactactccctgtttcctcagcattgatagatgttttattaagagagattttacatcgtgggtcatattctgacaacaaaattccagattttgcaagtcggtattggtattaggccaataccaacagattttccaacaatatatattttagatgtttttatgggtagtgtgaaacatagtagaagacagcaataagggcacactattaaacattttctgtcttaatctgatcttatttggggggccttgattaaattagcataaatctgccttttaaaattttgtctttgtttttcaaaataatatcttttgtcagtgctttgaattttggccattctggtaggtgtttatctcattgttgttttaacttggaatttcttagtgacatatgatgtttatgtttacaggcttacttgccatctgtgtgtcttcttggtgagcaatcagtcaaggatttggcccatgttttaattgggttatttattttcttatagttgaattttaagtgttatctgtatattttggatgaatatacctttatccgatacatgttttgcaaatattttctcccagtctgtggcttgtattctctttctcttgacaatatcttcaacaaagcagaagcttttaattttaatgaagttcaacttgtcaattatttcttttatggatcacgtctttggtgttttatctaaaaagcaattgccatatccaaggtcatctagagtttctccgttgttatcttttaggagttacatagttttatattttatagttagatctatgatccattttggataaaattttataaatgttttaagatctgtgtctagatttttttttcttttttgcatgtggatgtctggttgtcccagcaccatttgttgaagcgatatctttgttccatagtattgcatttgttcctttgtcaaagatcagttgctatacttagttattcagtgcttcttttagggctcttttttctgttcttttgatcaatttatctagtttttcaccaacaccgctctgtcttgattagagtagttttacagtaagctttgaagttgggtaatgccagtcctccaggtttgttcttcttcaacatccagtcggctattctgggtcttttgcctctctgtataaattatagaatcaagtttgccagtattataaaatatcttgctgggattctgattggcattgcattgaatcaatagaccaagttgagaagaactgacatcttcacaatattgagtcttcctatctaggaccatggaatgtctctccatttatagttctttgatttctttcattggagttttgaagttacccttgtgtagatctcgtacatttttttaagtcttatttctaagtctgtcattttgtagagtgctaatataaatggtattgtgttttaaattttaatttttccttgttcattgctggtttataggtaagcaactgacttttatatattaatcttatatcctgaaaccttgctaaaattccagaagttttgtgttgattctactggattttctacatagaaagtcatgccatctacacaaaaattaagttttatttctcgcttatcaatctgtatgccttttatttcactttttgtctacctgcattaatgagggtttccagtaccatgttgaaaaagagtagtaggagggtaaatccttgtcttgtttctgaacttagtggtgaagaaatttgtcatcaagcttctttttcaagtttactgggtttgtggagtttccaggtagataatttaagtgtgttttacatgcctcccttatctcagtcctctcattctgactcctggctgccgaacttgatctaggagaaaacttgcagacaagagatactttatttggaatgataccatggtagaagtaaaattttgaaatttgaaggactctctcaatgcatcatgtaatcctctctatacccaaatgtcacttccataaatgaagatgaaattagcccattgaatatttgataactcacacatttttgtcagcacatatgtcgtatatttttgtagaaataacagaaatataagtagagtgctaaattgtacatcaaaatattctgatttttttctctcaatatgttttctcacagatcatatttttaatatttaacatgtggcctgtttggttagtatatatatttctctagaaataaactgaatattcaaatctaaagttcttaaaaatgcctaataaaataaaatttttgtctaaaaatgcatggggactgcatgtggcttataaatgttatatttaccttaaaaaaagcattacgtaaattttaaaaattatattagtcaaccagaaaatatctcatatctgtgtaaccttaataaggcatctagggtaaattgcaattgttcacatgttttttttgttttttttttttttaattctggggtaaggacactgttaggggaatatatattatctaaccttagagaatttcacaatatttatacttcaagaagagctgtgtctgttgcaaactaatttttctgccataaacaaagagggaattatttctgaggactttaacttatttatttttccaaaagcttgccacatggcttcaaatgcattccacacaaacaattattgtgagaaatgagaagtgacaatgcatttaactccttgcatcctgtttttcagcaggcagaaatttgcatcttaaatgaataaaatgtgatggagtatgccaaactctgccatcatttggccaaaatgataccaaatgattgtgatttatttacttcacaatagataaaaataaactacccttagttaaaagttagatgcctaaaatgtactatattttatgtttattaagacaaaagctcagtaaaaagtctctgaacttcttaggagcatgagctatgaaattaagactctgctgacttctggcttcgttgttgaatgggattgtaggatattatacccctggtaatctatcttttactatcaagagcttagataactaatgactgctttctctttctctttctctctctctgtctctttctcgctctctctcatctagattgccagaaagctgagctttttttttgtgcttacttgcaacaaccatttgtaggctagtcctgctagtgtaattttttttcttcattagctaagatttgaaagaatttatagtatgaacagaggggtactattcccaggaggggagaacatcgtaagcaattatgcaaacacattaaataaaggaaaagagctgtatgttaagaaatttgcaaagagtttctgaaaccttgaaaaaatcattttaaagctctgaccttccgcttctctgtaaaatgggcatcacgatactcgcaaaaagctgctatgagaattagagtagacagtgcatgtgaaggtgtttagcacatgagatagacttagtaaatattaatgacatttcatctgcctttgggtattttttgagttcctattcacatatcaaatattttaatactcttatatcaaagagtatggttaaacccagattgttttctactagctgtatgagatagcaggcgttcacagcctcttgaagcttcagttcctttacgctgaaatgaggaaaagcagtgcatgaatcttgcaggacttctgggaagattaatgcagggccccctaaccctgggccacagataggtactggtctgctatggcctattaggaaccaggccgcacagcgggaggtgagtggcagtccagcgagcgaaacgtctgtatttatagctgctccctgttgctcgctttactgcctgagctctgcctcctgtcagatcaacggtggcattagattctcatagaagcacaaaccctattgtgaactgcacgtgcaaaggatctaggttgcacactccttatgtgaatctaatgactggtgatctgtcactgtctctcccatcaccctaagatgtgacaatctagttgcaggaaaacagggtcagggctcccactgattctacaccatgatgagttgtataattttttccttctatgttataatacaataataatagaaataaagtacacaataaatgtaatgtacttgaatcatcctgaaaccaccatcctcctgcccggtccatagaaaaattgtcttccatgaaatcgatccctggtgcccaaaagtttggaggccactggattaaaggagacaatgtatgtaaattttggcttataataagttcttggaaagtgctagctgtgtcttatcactgattatagtatcccaatcaaaccttgacacttgggttaggattatttatttccctcaatttataaatgtgaaagcggaggtacagagaggttaaacagcttgcccaaattcacacagcagatatgtgacaaagcaaaagttcaagctgcccgacttctcaaacctcactttcccatttattttacatcacttgccattcctatgtttttcatttagaccataaacacattagcaacatgaatttatcatcaacgtaatatggctaatacagttgatccggaatttagtgaagcatatataatacatgaggttttcaattaccagtcattattgatggtagccaggtcaaaagtatctttcagacattctagaagagtcatggagttacaaatttttaacatctgaaatctgaatcctttccccacacccaggcactacttttatctttagaaatgagcattttttgaaagactcattttaggaagcaagattttgattgcctttgtcttatatattctactttaaaattcagtatggtgaaccgggaataaataatcaatgcctgtgatgagataaagacagtttcttcccagcactttgagaggctgaggtgggcagatcatgaggtcaggagtttgagaccagcctggcaaatatggtgaaaccccgtgtctactaaaaatacaaaaattagccggacgtggtggcacgtgcctgtagtcccagctactcaggaggctgaggcagaagaatcgtttgaacctgggaggcggaggttgcagtgagccaaaatcactccacttcactccagcctgggcaacagagtgagactccatctgaaaaaacaacgacaacaacaacaacaaccacaaaccatttccacacgttttaatttaattgctttttaaagagcacgaggaaagactaagttactcaaatacattttgtagactatctgtaagaagcaaaagtaatcagctcattaaatatatgcaggagaatagtaaatgtaatggaagcctttcacctcttcataagagaatcaaatgaatgtgagtttgaactgaaatccagccttcacttaaccccgctgccacctctcctcaaatcattctcaacttcacagttaaactgtatgcatattataagtaggaggctcatttattggtttcagtgtctctcaaactaaagtccaaggacatatcccacaagatgctctcagtgggggatggagaaaacaaatatgaccaaaggtagacaatttgtcaacctgggttaagaccccttcaatttttctataggcttgaaatttttcacactccacagtttgggagaaaaaagccagaagctattgccaatatcctgatagaaattaacctagtactataattaagacaatttcaggtcatgataggaaaatctatacatcagtatttattaagggaaagtttgtgggcggtagttgcacgtgaaatctccttgtctgaaagacagaggcatggtggccaggctaccaaggcatcagcagtctgcccaatcccatcccttctcctcctgaatttagcccagtctatatttaatacaaagacttagtccacagactagtgaactaatgtatttgcattgtacaaatttaccttcgaaaagttttatacatatatttttgtgtaagttggcatttttatttaaattttgcaaatcatttgttgacaggatcaaagggaaaatagcatttcacttcctctttccagacacctatttacaaagtaaaagtctctatttttttcagctttacctttctgactttttggattactgctatctaataatttatagtaaaattggtgtatttttattcctctgtactcaggattagctactgaaattgacatctgtttacataaatttagtttaagggtataatttggagataatttgaatgtaattccttcaatgtaaataatataaaaatgtagcatgttatgtacaatcttctagataaataaaaatttatacagatgctcctctaggaaactaaactaaaattctaaatttaaactaaaattctaagattacatattgtagttgaaatcaagcatcctttatgagacgtaccaaatatagcctcttctgtatgtttgaagacataccaagattaacttgcaaaatttgttgtaatttcttatttgataatagaaatctggttttctatgattgacacatcaattgttagtgattcataagctaatcagttctttaactgggttaaggcaggcacaagtattctcttttttatcatcaaaagaagatctatcttgaaatgaattgttagtagacatatttttaacacagagaatattcaatattaatcaaatttatttttgacttctcaaatattttatccataagagaattattctgtttccttgccattacaacttaccttgccattttcacgtggttaaaaactagttcttttttttttttttttttttttttgagacagagtctcgctcagtcacccaggctagagtgcagtggcacgatcttggctcactgcaagctccgcctcccgggttcacgccattctcctgcctcagcctccctagtagctgggaccacaggcacccgccaccacaccccgctaattttttgtatttttagtagagacggggtttccccgtgttagcccggatggtctcgatctcctgacctcgtgatctgctcgcctcggcctcccaaagcgtaaacaactagttcttactctttcacttttctgtctcctaaggctcgaaatgtattgtctcatataccaaataccaaatgtttaactcaaaatgtactcagtcattgctgaggaagaattattttgtttaaccctcataatatattagtattcttatacccaagaaatacatacagacatttaagttgaaatcaggagtatgtggggatgagaatggttgatgtcataagtactccagtatttaacagtgatatagtttgaatatgtgtcctcacctaaatctcgtgttgaattgcaatcctcaaagttggaggtggggcctggtgggagatgatcggatcgtgggggcggatttctcatgaatcgtttggcaccatctccttggtgctgtcctggtgatagtgagttcttatgagacctggctgttgaacggtgtggcaccccgcttgctctctcttgctcccaatccctccatttgagacaccttctctctggcttcaccctccaccatgactgagtgcttcatgaggcctcccctgaagcagacgtctgtgttatgcttcttgtacatcctgcaaaaccatgagccaattaaacctcttttctttgtaaatttccagtctcaggtagttctttattgcaatgcaggaacagcccaatacaaacaggtatagcaggtgtgtcataatttaagtcaaaccagtgactaaaatagcattctaaccagacccttccagctcttacagcagtaagctcccttaggaagatttgatattgaccctgttttagggaagctttgatgtatttgctgaggcatttgttgactttcaaaagcaacttcaatttaaggcattttgtacatacataacatactgttagtacaaacttatgaagggtttccaatatatcctgataaaaatcctctctctttggagttacataattatagagcacagaaaaaaaaatggagtttgacccaatatgaacttgaaggaatcaggattggcagtgtgtgtaaaaatagacatacaaaggaaatcttttagaatatattttattattcagatttatattaaaatgaattagattatggtcctcccacatttctgtggcagcatccagaattctattatatttacttccaattactgcagcaaacctagacttcaactattagccaaaggctaaagatgctcctttgcagttgccaatatatagaccagtttcaggctctccagtggtggacagatggtcattcccaggctaatattgccctatttccatgcaagaggagctattttagacctttagagttatggttccagtgaaatcagagactttgggaagacagtgaatctttgaggatacgagaggacaatagaccttcttcattctcctggaaggcagcttccttccagaattattcactgaaaatctctgcttcacaaattctctggaattctcaagtggtgacatgataatattggttttctatcattacaatgaatataaatatgcaattttttgtttttcactaaatatttcaagtgattcctgatgctgaaatacaatactacgtgaattatgctaagttgtcaaaagacttcttgatgcactggttttatagacaggcatgaaatttcattgcataattggatgtgggttgtgcacataggagagggaggtacagccagccttccatacccacagattaaaccaatctcagatttagtatactaaaaaaaaccgcaacaaaataacgtacaacaataaataatagcacaaattcaaaaaccagtgcagtctgacaactatttaaatggccgttacattgtactagatattacaagtaatctagagatgatttaagatacatgggagaatatgcatagggtatatgcaaattctatgacatttcatataagggacatgagcatccaaggatgttggcattcaaggggctcctggaaccaatgccccaaggatactgagtgatgactgaatattgttttcttttcttttcttttcttttttgccatagtgctcttcttacagggtgatgaagaaacacccctatcaaaagatgggtgtgtgttctcatctgttgaatgtaggcagactgttgtaacttcctcatcccataaacagtggtgtgcaatttccaaaccatgtcacaaaagcctttgtgccatccttcttgctttcttgaattgcttgtaattagggagttgtagataccatgtcatgaggatcttgaagaaaccctggagagtgagagggtcacatggagacaagttgtggccgttggccaccagccgtcaccaacttgccagccatgtgagtgagcctcttggaagctggggccagagtcccacccaatcccttagtagatcgtccgggtctagccaacatgtgactacaactgcatgaaagaccttaaatgagacctactcagccaaactcttcctaagtcctgtccaaacaaaaccatgaaggataagaaatggttattattattttaagctaccaccttttggtgtgattattatatgcaataataggtagcagacactggctttggttggacatgtatgttctctgcatattctgcttttgtgcatgtggagaaatgggctttctgggctgctgacaatgaggaggtagagatgttgttcaggcagatgcgtttagacttcgagtccactttctccttccaagaactatgtggccttacaaatgctggggttggtttaagaaaacagaactcttaatgtttgtaaacattcctgtacgagagttcatccatcatttgtgtctctctagaaaggtcatacgcagaaaatgtagtggtgtagcaaaattttgaacttttcagagctggcaaaatcctttctttagtgtatagtattactactcatgtccattatgaaccatgagcccagggagactctgctgagacaggctgcatctcctccagccttatcctcctaagatcaggcatcctacctaaggggagcatagaatttagcccctgtttgtggggtggtgtggattcttcccacctgtctaatccacctgagaaacagtagtgaaaaaaagaagaaaatgacaaaaatcgagctgatttttgtatctacatatgtagataatatatgctatatacacatgcacatagaatgtatacgtattatatttatatatgtatggtcatttttgaccactcacaatatacaagacatgataattttcaacgtgtcaagttagaaattaccattctacctcactaaattatctcaaaaatcttgatacctagtatttatatattttataaattaagtaacctaagtctaaacaagacgactggttcacagaccactatcctacatgcaagctgcaataggaaaataatttctcagcagtgattttttacaagtgaaaataacatttaaaaattacagaaaagccgatgaatggaaataatcagtgacagatgtggtttaagatataaaaatgaaatctgaatccattgtccccagtgtgtaaaaatgttttacgttgtttcttgaaaattctcattggatgaccctctcttgttgtcatattaattctgaaattctgattttagtctattttcattttcacaacagaaccaggaacaaaaagtgtaccctaggggcatccaattaacaataagcaactattgtatgtttgttggaacatacgtgtcaggagggccgaaagcatagctgacgtgataagatatacaaacaaaattaatgggataaaacagtatgatggcatcaagtaaaacgtttttgtttacatttttgtgtagtacagaggttacaatcagaaaaggagttgtcagctcaagaaattgaataaattaaataataaattaatgaatggaatatttctgttgggaaatcacacacagcacattaaatgaagttcattagaaagtgggagctacaggatgaaactgacaggcaagggatgctgaattatggtcgtcttgtaaaatttaataccacatttctcagctttaaagtattaaacctaccaaaaacactaaacctgcatcccacctttgtaacacttttgaaaaccccataacctcacctgctgttaattctagatctttacagattcaaagaatatatatatatatatgcacacatatgagtttctcatgttatttgcctttttagttttttgagaaataggccttgtgtggttttccaaataagtacaaattgtactgacagcatatatttttatctcctcaagaagacagttccttgtcattgttctttccagcaacttgacattttatttaggtaacctgttctccactttgtaatatgttagctatcatcccagcaaaattgttctatattctacagagtggtagtttattttttttttggaaatacggacaaagcattcaattatttgtcgccatgaccgctctcggggttagttaactacatatgcaactaaaattggataaatgtaattaagaaaattggtattgtagaggtttcattgttctatagaattagagaattctaccaactgaatttataacctgagcatgaaaaccagatcctttttcatatttaaatattaaccagagtaagccatgtactaccttaacaataaaaataaaattaaacaaactcaaaaagtttgaagaaataaaatgataaaagctaagtgaattctttgagctgcagcttttttaccgtgctgcacagttgcctggcttaggtcagaaccttttcaagaaaggttccatcctgccacggctctttgaatttttcttaaatcttttatgtttaaagatatctaattatattctattttaatacttggataaattaagaatttttaaaaattcttcatttttgtaaagtattaataaagtaattttttaaaagtaaaagaataaattcaagcattccaatctgttaaaatatcctttacaatgtactaaccggattatattatcgtgtgtttcgcctcatttttgttatacaaattttcatgtattaagatgatccatggcagggcacagtggttcacacctgtaatctcagctctttgagaggccaaggagggaggattgcttgagcccaggagttggagaccagcctgggcaacatagggaaaacctgtctctacaaatatttgtaaaatttgctctcagatactcaaaaggctgaggtgggtgaactgctggagtctaggaggctgaggccacagtgggccagtgatcccaccactgctctccagccctggtgacagagagagatgctgtccccaaaaaagaaaaaatccacgtgatatttacttccctagcacatgacatcatgttgctgtatcctgatttgactatcagttattgtatttttaaatattttggttttctttttgtttcttttttttaaaattattttaactgtaaatcatacatagtatgaacccctatatacagattaggctatttacttaggatctgatcccaaagttcagcagaagttgaacaatacaaattataacatattcccagattgttctttagagaaaataaatgaatgaactgacaatatatgcatacatgttacattctcccacccactcaccattttatataacagcttaatttttttattttaatgcttaaaaatagatttaatttgcaactctccaactgcttttgcagtgatgcattttttccacaggacagttttcttttttattgttatttggaacaagggcatgtaggcaaaagatgtaaatgctttccacagcctgttgcttccccagtggttctccacctcacctgcatgttgctgtcaattcaagaactttaagaaaccctgatgcccaggacaccccaattccagttaaatcagagtcctgggagtggaactcaggcatcagtacattttaaagcttctcaaatgcttctatcagccatccaggtttgggaatgactcatctcaattgatcatggagtctcagctgggtgtgatgggagattggaaggaaaacagtaggcttaactttattatatggggcaatcggaattaagctgtgttgtcagccttcctcccatctagtgccctcaaacaaacccttccctggccctgaatcttctctcattgcctatgtccttgcctgtcacagtctttctgcattgaaacagtccatgaaaaaggtctcctgatctaaactaccctgtaattagcctgataagtacctcatctcctacttgtatgctttttctgatctgtttccctgtagagtgaaatcttactttctgaacatccaaatcctgatgaggttttactgtcaatgaacaactgatatttttacgtgaattaagagacacagcaattccacttcatcccagtgtttttaccagctacttggacacactcgcctactggatttgacctctgtgaataccaatgctggcctgggtgtcagtatttgctagaagcccctgtgtgggtttgtcttcccttagctttagccaggaagacatctggcctcagcaagcacactgctgctgtgattcttttgcttctattaagtgcaaatgaatgcactttatgttgatggtgtattgcataagactaatttctggattagcgaaaaagagctctttttcatttatcagacattttctttcttacatcttattttccttcagcttcaaaccatgtctgcctcacccatatcagtaaccacattaataatgacgagaataattaactttcattgcaacctttttccatccttataacataagtcatggctgggtgcagtggctcacccctgtaatctgaacatttgggactactaggtaggaggatctcttgagcccagaagtttaaggccagtctgagcaatatagggagaccctgtctctataaagatatttaaaaaattagccaggcatagtggtgcatgcctgtggtcccagctatacaggaggctgaggtgggaggattgcttgagctgggaggaggtcagagctatagtgagccatgatcacgccactggattccagcctgtgcgacagccctgtctcaaaaaacaaaacaaaaacaacaaaaacaagaaagccataagtcttttacaaatgctgtctcctttaattttaacaacctacaaaacagttactgtatttatccccagtttttcagatgaagaaacagtagattgaataatgtttattggccaaggttcaagaaatgacagagctggaggatttaaacctagcattgcttaattcccagagcctgagctgttgaccatgttttatgaaaactagatttcttaaaaaaaaaataattgaggcccttacaaagtctattcctgacctccatttatatcccctttgttcccactcactgccatttttacctacctttcctcaagcactgctgaccaactgattgttcctggatctgtgacaactgcatgacttgccatgtgctgtttctcaggtctgagatttttgctctctccttcaaggtgagctcccactcataattttcaatttagttcaaatgtcaaacagttctatgtgaagctctgagcccccacatcagtcaattgtgcttttctctgtgttcttacggtgcttggtaaataccttgatcacagtgttcatcacttaccagctaataactttcaacggtttaagctctgtaagcctcagtttcctcatctacaaaaataaagataatcaaagaacttatctcagaggcttatgagaattagagataatgaatgtaagatatttaaatctatgttatataataagcattttaaaagctattaactgtatttcattaccatccccttgtactacaacttttgattttttttttcttttcacaactgctttctatgaaagtggacatgatgacatgcattttatttttccatgttttgcaaagttctcagcacagaatggaaacgtgtgggcttacttaacaactccatctctaaaatgaggaccctcaaagggcattagtgtcagcaactatcattatttagtaagttttagtaaacgaaaggttgcatttaaagggagtaaaacacttgcatatcagtagtttcttatgcagagatgatggcaagtcacagtagtccatgtctgcgagctcatagacagacctctttgtgtgatgagatatgacaagtctttagattttttcctattagtaccctgcagcaccaattcctgctgttgtgcaaggagtacctgaagtgttgatcagcaagagacttggcaaatcttgctgacatgtctcttctgacaagaggataaatgctttccatggatcctttctgtcctgcactggccccttggctgaccatctgtttgaaagtgcagggcatgatggtgacaataaataaggtgctcttctgtaaatttcagtaatccaactacagtacattccaaagcatgactgaacagcgtacctggtaatctttgttacaaatagaacctgcagatcctggagcagcagaggttagagatggaaataaaagggcattaatttaatttgggcaggctgggctcagtggttcatgcctgtaatcccagcactttgggaggccaaggcaggtggatcacctgagtttaggagtttgataccagccctgccaacatggtgaaaccccgtctctactaaaaatacataagttagctgggcatggtggcacatgcctgtagtcccagctactcggtaggctgaggcatgagaatcgcttgaacctgggaggcggaagttgcagtgagccgagatcacaccactgtactccagcctgggcaacagagtgagagttggtctaaaaacagcaacaacaacaaaaaagaatttaggatagagacagtctaaataaaatatttttttccagaataacccccgaaaacaatgtggatattcttctcattcaggcttaaaggagccatctatacctgttagatcctctgtttcctcccatttccttcataatccacagatgtttttatttagtacttaatggagtggttctgaaatggttgcctttcaagaaaaaaaattagatttaaaaaatctttaccaaagaaatgcatgtgagtcttgttttgtttttggaggtgatacatcacaccatagcacgtcttaagtttatggagtaccagatgctttgaagtgatcatctgaaagggaatatatgaagttccaatttcaaattaatttcattttgaaagctaaataactgatacattataagatgcctttttggccgggcatggtggctcacgcctgtaatcccagcactttgggaggctgaggcaaggcagaccacttgaggtcaggagtttgagaccagcctgaccaacatggtgaatgcctgtctctaccaaaaatacaaaaattagctggacatggtggcatgtgcctgtaatcccagccactcgggaggctgaggcaagagaatcacttgaacccaggaggcggaggttgcagtgagccaagatcgtgttgctgcactctagcctgggtgacagagagactccgtctcaaaaaaaaaaaaaaaaaaaaaacaaacaaacaacaacaataacaacaacaaaagccttgttaattatctgttattattactttacttggctaattgtatatttttctgtctctgtccattcgtcattaatctttgcattaacctaatagccattatcttcagacgttactctatgcaggttcagtgcctgcttgaggtgctattctcaacccttttcatctattaaaaacaagtttactagacaaactttatttgacgagaactcttcaactccacaatttattattattattattatttttttttgagacagagtctcgctctgtcgcccaggctggagtgcagtggcgcgatctcggctcactgcaagctccgcctcccaggttcacgccattatcctgcctcagcctcccgagtagctgggactgcaggtgcccgccaccatgcccagctaattttttctttttgtatttttagtagagatggggtttcaccgtgttagccaggatggtcttgatctcctgaccttgtgatctgcccgcctcggcctcccaaagtgctgggattacaggcgtgagccaccgtgcccggcccaaattattttttttgttacttttgttagtacttttcttcaaatatagatcaaattaattaattgcaccattgagtcagctacatatttctcagctcctcaaattcagctttctatcccaacaaacgaactgaaactaatatgatatatttttaactatattgctcgatccattaaaatttatgttgacatttaaaagacaagctgctccaagcagtgtgtctgtaaaaattgaattaataatgaaaaatactaagaaaatggagacttccagagtgtgactcatactaatgaaaaagaagcattcaatagaaactgtcagtgcagggttccaggtatgaaactaggtatacaaacgtcagtggatttcagtggagctatagtaagtatggcctaagaactaaaggatactatgattgaagaataaagtatgtgcgtgatccttcaccaaatggagaatatccgtaaagaggcagaaattatgtaaaataacaaaatgaaaacttagagaggagcacaaaagcagtcttgagatggcagaagaaagacccagtgaccttgaagattgatgaatagcaattatccgtgaaaaacaacaaaaaaaaagaaaaattaatagaccctcagggactgtggtctaaacaacatcaagcatatcaatgtatgagagttccaaaagaaaaaggcagaaaaggcagaaaacaaatatttgcagaaataatggccaaaacatcccaatttttgtgaaacatatcaatctacatattcaagaagctcaacgaactgcaagtcagagaaacataaagagatccatgtccaaacacatcatgatcaaactgctgaaagataaaagacagagaaaacaagatagaaaaattaaaatgtttattagagattgttattaggatttttttgcagaaattgacaagctgacccaaaaatttatatgggaattcatatgacccataataataataataacaataatgataataaaaactttgaaaaagaagaaccaagttagaggacatgcacttcctgattttagaaattaatataaagctacagtaatcaaggcagtgtgatattagcataaagatggatacatagatcaatagaacataattgagagtctaaagataaactcttaaaatatggccaggaattttacttagcatatgcaagaccctgagaatatcagaattagaaacttttaaaaatagttttatgagcaccaatgattgtatttcggcattaagcataaattttatagtttgatcacgtcaatacacataaaatgttggaaagtaacgttttctggtacatttacttaaaaaggagttatgaattaagtgtttcaagatatcataaactaggtaaacaaaaatcatgtatgctatgtgctttgtcgtataaaaactaatctctctagaatggatttttttttttttttttttttttttttttttttttttggaggcagagtctcgctctgtcgcccaggctggagtgcagtggcttgatcttggctcactgtaacctccacctgctgggttcatgcaattctcctgtctcagcctcccgagtagctgggaccacaggcacccgccaccacacccggctaattttttgtatttttaatagagacggggtttcactgtgttagccaggttggtctcaatctcctgacctcgtgatctccgcgcttgggcctcccaatgtgctgggattacaggctcgagccgccgtgcctggcctagaatggatatttaaggtggagtatatttcttttttcttttccttctttctttttttttttttttttttttgagacggagtcttgccctgtctcccaggctggagtgcagtagcgcgatctcggctcactgcaagctccgcctcccgggttcacaccattctcctgcctcagcctcccgagtagctgggactacaggcgctgccaccacgcccggctaattatttgtatttgtagtagagacagggtttcaccatgttagccagggtggtctcaatctcctgacctcatgatccgcccacctcggcctcccaaagtgctgggattacaggcgtgagccaccgcgcccggctggtggagtatatttcttataaaatatgtaggagttggccaggcgcagtggctcacgcctgtaatcccagcacttcaggaggccgaggtgggtggatcacgaggtcaacagatcgagaccatcctggccaacgtggtgaaaccccctctctactaaagtacaaaaattagccggacatggtggtgtgtgcctgtagtcccagctactccggaggctgaggcaggagaatggcgtgaacccgggaggcagaggttgcagtgagtcgaggtcacgccactgcactctgcctggtgacagagcaagactgcctctcaaaaaaaaaaaaaaaagatatgtaggagttccactctacttgataaagtttaacattaagatcctgaaaaatagaaaaatgtaatgaaaactagattaagtatgatagtaattaagaatattgaaaaaagatgattaagaagaataccctctggtgaagtttaatataatctctcctataaatctatgcataatcacctctaaggaaatgagaacacaaaagattaaagcagattcagctaaaatattatctatgtctttaagtgcttttcactaattcattagttgcaataaaaagttttttttctattttttgcaaaatgatcccataatgaaaaccttcaattaaataattttaaagcatcctttaattctctatagcgctcttctggaaataatatattatgaagcactttcatttccctttcgatgagaaaaggtcaaataacctcaagtttttgtctttttttttagaacagaaaaacattctgtcccttcttttcataaatttgtatgtgaatacgattttttaaaaatacagaacaggacccccattactaagctaaacttcccatgattgtaaaacactatgccagcaatgaagctaatctggctgccagcttgtgtcagtccgtccttacactgctatgaagaaatacccgagagtgggtaatttataaagaaaagaggtttaattgactcacagttccacatggctggggaggcctcaggaaacttacaatcatggcagaaggtgaaggagaagaaaggcaccttcttcacagggcggcaggaaggagaagtgtggaacaaagtgggaaaagccccttataggctgggtgcagtggctcagcctattatcccagcgctttgggaggccgagatgggtggatcatctaaggtcaggagtttgagaccagcttggagagtgaaaccccgtctctactaaaaaaaaaaaaattacctgtgcatggtggcaggtgtctgtaatcccacctactcaggaggctgaggcaggagaattgctggaacccaggaggcagaggcttcagtgagccgagattggaccattgcactccagcctgggcaacaagagccaaactctgtctcaaaaaaaaaaaaaaaaaaacaaaaaaacccttaaaaaccatcagatcttgtaagaactcactcaccatcacgagaacagcaggagagtaatcagccccatgattcattacctcccactgggtccttcccatgacatgtggggattatgagagctacaattcaagatgagatttgggtgaggacacagccaaaccctaccacacctctcctgccctgttgattctgaggctggcttagcagctcttgctagttatggggaggctctctgcttcttttcttcaccatgagtgttgaaatgaaaatgctcgttttagggctgggtgcagtggcttatgcctataatcccagcactttgggaggccaaggcaggcagatcgcttgaggtcaggagttcgagaccagcctggccaacatgtccaaatgccatctctactaaaaatacaaaaattagccaggcctggtggcagatgcctgtaatgccagttacttgggaaacaggcacaagaattgcttgaacccgggaggcagaagttgcagtgagctgagatcatgccactgcacttcagcctgggtgacaaagcgagactctgtctcaaaaaagaaaattttaggagaacgtgcatactgatttgcacatatacatatttaattttcaaagcgtattcacagaatattacctgtatttaatttgctgagctggtggtactaattccatttgatgaactgggatatggatcgctggctaagttaatgtcatgtaactctgtactgatgccaaagttagccacatcttacttccagacatttaccttatttctgttttcaaaaattattaaatctaaaaattacttctgattttaaaaggattctctgaaacagaaaacaaagacaagttgttgcatggtgcaaagtgatggaaatttggccaaatccaacctaagtttgaatcatcaattttcttatctgtaaaatgaagctaatgtacattttaaaggttattatgaagattaaatcataagattcatacatggaacatttagtattttacttggttcacataagaccatcaataaatagttgtaaataataaaaatgataatttaactttgattttagtaaggttatcattaaatgaaaggttcggtaccactggtggtagctgctaagcttgagtaaagacttattttgaagatgctatattttttataagactgctaatccattcaaaaatagtctactacatgccaggcactgtgctaggtgctggacatatagtagtgagaaagagtccctgccctcaggcagcttacattttagatggatcttttagtatttgcagcctgggctgctcctacagctttcttccaccaaataagtgtactttgatcagaacctcagaagtggaattaattcagcacacagtgtttgctgaaggaagggggatggacaaagaaaaacttggggattcaccagggtaccaatcaaccgtgccagtggcccacactggcccagaatccacgtactgtggacttaaactcacttggagaattcctctaataaaaggttaatattggtattatgtacatctcatacctaacgcaaaaacctctccatgtatgttgtcttctctctccaaagggagaattcactatattcctgccatattaccaagtttagctagaattttgagtggagcgccaatcaccaagtcttacttaagatgcctttatttcctatctagtatgttttcagtcctttctatttccctttgttcctttgggccctgtgtttttggcaccccatacctacatcgagtgtgggttctgccctatgaaaatactcttacagtcttgttagtaaattattcaggcttttgtgttgctcttgagttttggttaggcctaagaaatttattccatggggaagactttgtttttcccttatccatatatttatttctgtttggggatctctctttgcacatttctgacctgaaactgctcttgaaacttctgaagcttgtttccctaggatcaaggagacaacatcatggaggtcagtggctgttaatgggcacagccacaggttagtccggagcaaagataagggctgctaaagaggccattgacctgagctgtcgggtacagggtgttgcagtttgattctgaaccataccttgaaggcagcccggtctggaatggctaatgaggctgaggcaggttagatatcataagcataattagatgaacaatgtgcatgtctttttaactgcaagccagctgagggtgtgaaagggtactatttaagccccttcattgtattgctagctcctagtctagggaggcgtcttaaagatgttgccccaaattccatctgaattcagagtcaaggaagcagtgacaacattgaatttatgtggcttatcttcatggtttcaggtttgcttaggtttgattgcttaccttaaattctaacctcagctttggtttttcagttcccccaaatggacagtgtcttgaggagcatgtgacttgaataccctccattctataatttacttagaaatcctagctggaagacacggttacaagtactctcttggctacagtcatcctcctcctgttgcaaacaatctctatggagatgagaacataatcgtagtcatccttgattgcttactgcagttgtctttaactctgtcttgacattaaaggaagtattatcaattccaaagactaaggacaatttttaaaatgtgtaaatattgtaattccaaaacataccatagacacagacacgtgcataaccaagatattagtaaaccatcatccactcaaggtaattatatgatttctgagtcacaaatcatttccctttaatacaaaactaggaaaatatccaaagactagtgaagatagccatctaagtacctgggctggtaaatgtaaaacaagaaaaccctggtcgtaatgttttctatgttcttttggctgcctgccttcttactgtatttccaggaaaaccaaggtcttttcagattttagaatcagttatacactgacttttgagtacttgagagttattatgcatcctagtggacggcttagaagaggttgtaagggaataattttcatttcaatctaaatgtatattttgcaactgttgatgtatactgatagaaagcttcacattccagaatggattctattaggttttaaaatgataattaaatttctttttcttttctttccttggcttcaaagttgacttttaagtgtcacttttttggtctctatctttgagtcttcagcatgttttaaatgcctgaggtattcttagactgattgccaatttctctgcagtttcttaaaaaaaaatacccctttaactgatcctccagtctagacgtctcctggacgagtgtcaattgttcttctttctctttttacatgtgagttaaatggtacatcgtcctgtgttaggcagttcttgcattgctatacagaaatacctgagacagggtaatttattaagaaaagaggcttaattggctcccggttctgcaggctgtacaggaaggatagcactggcatctgcttgacttctggggaagcgtcagggagatttttctcatggtgaaaggctaagcaggagcaggcactttacgtggtgggaacaaagggaggtgtcacttactttaaacagccagattactatcgaggacctcaccaagccatgagggatccgcccccatgaaccaaacttctcccaccaggccccacctgcaacgctggggattccatctcaacatgagatttggagggacctccaaactctatatcagtccctaataaagacccctcctaccagtaaggttcagaattgaattccgtttgttccctaaatacttatttgattgcttttattttaagaatgtttagttgaatagctctccaatacagaattttgctcttatggtcacttagttcccaaagttcatcgatcctcatcctaatttcttttttgcaaagggtctgtggttacactgagttctgcaatttatagtttcactcctgaaaatcattcttttattaattaaagaatcagatagattaagatttgatttccatctttgcccactcattggctaatttggctttgaaactcagtctatatgagcctcaaggtctatgaaatatggatactattaacaatgctgcaagagtgttaaaagaaaatatgcgtgtaaatgagtcataagcgcttggcatgtgggtagccacgtgagcagtgttaattatgatattgctccagctgaaaaggttgaaggggcagaagagaaaaaaggaagaaggaaaggaagaggggaagtagcagaagaaagaaaaagaagaaagagaaatgcaggagcatgtaatggctaaaataatgagattgcagcttagccttttgggaaggtttgccaagtatcccttcctttaatttacatagttctcatcttccatgcaattataaagtgtgatgagagtctctctgaaatgtattattttcctttcctttctttttccctcaggaagatgccaatagaaactgcttttcagtttctctctgttggccgtttgccctaacttttgacctcctctctgcattagctaaactccacctcacccctctatcaaacagcttgaccacttctgctctattgtgacagctctgattcttgagaggactctttatcccctgcctgccaaagggctgtttcaacccaattagatcatgttggaagtagacttaatttaaataggttttgaagctgctgtctctgttttgtaaattatatattttaaaaatctactgatttttgtctagttcatttaactgtccttacttaaacttcattaaaaaagtcattggaacatcagcatagcacatgtggaataaatataggagttaattttcagtacaactggtctttaaagtttaatagccaataaatataaacatgaaatgacagttgcctcattacaaatgtaaacacacatataaacctacccagtagcaatttgaaacaagcttaggaatccacctcctacttttgttatgcctgagccttttcctcaaggctgtctttccctttgatttattaattccttccttaccactgtggctatcaaataagtgccctaaaatagttatttctaatgaaatataactttaggattttaacaaagagagaaaaaagactcttcgtataaccctttcaattaaagaaaactgagctacaatgtgcatttttatccagaatatcaccatttgccccaggcccacccaacccttggtgtgcttaagacatggctttgtcagatgtaaaactctggacataactgctgtggggaagaaaagccacccactcatgcccaagaagctgcttcagattccctgatgatcaggttcaaggtcatttttctgtaccttctttgttaaaagatgctttgattacacagaattctttcaatttttttggcctttgttctcttgtaattcaatgagaataagagaatgtcagttgcttcagcagttagtgacactggttagaactcccctaagatgaaagtctgaagcccagatgagctgtgagctggatgtcccccagtggggttagccttccacagccctcagagcacaaagacgattttgagtctcagccgtcactcttatcaaatattcttacccttttgcagcaattacttttgtcactattgctattatggttctgctaaaatttctctttctttctcatatttctgtacagtcatgcactgtgaaatgatgttttggtcaacgatggaccacttatacaagagtagtcttctaagattatactactattttggggtttgtttttgtttctgttttgagacaagatctcactctattgtctaggctggagtgcaggggccccatcttggctcactgcagcctcaacctcccaaggctcaggtgatcctcctacctcagcctcctgagtaggtgggaccatgcccggctaattttggcatttttttagtagagatggggttttgccatgttgcccaagcaggtctcaaattcctggattcaagcgatccacctgcctgagcctcccaaaatgctgggattacagtcatgagccactgcgctggccaaatgccatatttttacttcaccttttctatgtttagatgtttacatacacagatgtttcctattgtgttacagccgcccacagtattcagtacagtaatgtgctgtatagaaagcctaggtgcaatagggtttatgatagagcctaggtgtgtaccaggctatgccatctaggtttttgtgagtgcactctatgacgtttgcacaacaaggaagtcacctaatgatgcctttctcagaatgtgtcctcattgttaagtgaggcataactgtataagaaataaatttcttctcagcatgtgttgactactttatcttaacaaaatgttaacataatttagcctttactacagaagtcggcatcataatgtgtagattgcttatgctaatcgggaagtgttaaggtaagctgtgtctattttaagtgaagtaagtggtttaaatgactccatttcagagaaaacttcacttcagtaatcctttaaaaaaatctgcctctgtttccattcccaatagtaaaataaatagataaacaaacagctcttactaaaacaacagtaatttattatcttgcaccagaagaaattagatttcaaatgtggagaaagtctgggatagtagcaccacttttagaaattacacattatgtttgttttaacataaatttgaattcaaggaaattttcgtgctctcaaagaaattgaggaacttcaaataagttacctacaaacacacggtcttattattttcagcatactaacttctaatttttactaatttaccatacacaatattgcctgtaattttagttaactaatacatgccattttatattctgtattttgcatacatttccttatatcagtataacttccatatttcttattataataaagtattatataagtatagcaatttaacattccataatgttaaactgtttccctgatgttgtgttatggtgttaataacagtagtaacaacagctaccatttattaactgctcacacaataaatgctatgttaaaagcatcatttaacaaagtaatgaagaatcttgatttgttacgtggaaatgcatagatttaagaactcggtgtacaacaggtccttgaataattttgttttattcaactttattttcttataattataatattgatggaaaaaaaattcttagttggggccaatgtctgtgtggagtttgcacaaactccccatgtctgtgtgggttttctccaggtactcaggtgagcaagaacctatcaacaacattaagtgaggacttaactgtactaatatctgtgtgactttagtcaagaaaaaaattctctatttttttcttcatcttcaatatcttcctttgaacacatataagtaatagctgacttagaggttgtacctcccactgagcctcacatatagtaggtgctcaagaaatgagggaatgtcgttactgggagctgcctaaagttgacttacatccataaaatgaggagatttattttattttgtgcatatttcaagatggatctccaagataactaaattgtcaatgccacctgcaatatgctatgttcattttttatttttattttttatttatttattttttgagatagggtgtcactccgtcacccaggctggagtgcagtggcgtgattacctctcaccacaacctccacctcccaggctcaggtgatccttccacctcagcctcccaagtagctgggactacaggcgtgtgccactgcgccaggctaatttttctatgtttttgtagagacggggtttcaccctgttgcccagggtggtcttgacctcctggactcaagcaatccacctgccttggcctcccgaagtgttgggattacaggcatgagccaccatgcccagccaattttttatataccaaatcctcaccaagattgcctttctgtcattcttcctttacttgttcattcttcatttctttctctcaacaaatattagaacctgctgcacacctagctgtctgcaaatcactccagattgtaactcctgtgaaggaaattcctctattcaacaggaatccgaagagcctagtggagtataggcagtagataggcagagtaggccggtagataggcagaaatatgtatgtgtgggcattttttaaaaaaccatgtctgtcttcccccggagattataattaatcatcttgatattatactatatcagacagaatgaccaagatataacctcctgggaaagacagatacgcaaacagataataatacaatattattatattatatacattatgttcaaaatgttatggcagtatatttgtacctgaggaactagggattggtaagaattagcttttgagttattattttttcaaatgaatagcagtttaccagataaatagagaggcaccccaaattagaagatgttatctactcagagaaaacaggaggagcaaagtcaagtatggagcgtaggagagaactgaatatctggcaaccatttcctacagctgtaataattttggttggagattagtattagaagaggatggagagaaagcaagctgggcagttagtaaatcttgcgtacctcccatgcgacaggcagtattctagacattttgttcatattttgtcttacaactctcagaaaaactctattttagaggtgatgcaagtgaggctgttgaatatgaggccagctgtccaaggtcatgtagcaagaatatatcagagttggtgtttagagccaagtcttccagctcaaaactcaccttctcttcacctctaagatgcaatgaaatgggcaaccacttagcggccttcttatttatttgggcttaattaacttctctgcttgaagataaatctttgggattttgttctctgttgtctcaaaaatagacattttacaaaatgtattttaacttcctttgatatttttcaaaagtaaatgccacctctccatgggagtcctattatgtatgtagcagattcttctctataaccttcatgctttcttcgttttacatttttaccatttatgcatctttgctgtggtccactctttgcccttaaatgggggcgaatggaggatcttttaacttttttagagttcttctgtttgttgttatcatcacctttcttaggccttcagcaggaagactggttgtctcagttatctgtcattctgaagaatggcacctttagggagggagacagagccctggatattcccttgaagagaatgccatcctggcacattgcagaatgacactatcccggtggccatctttctccatccatcctcattgcctcagcttgtgggcccgacatgaagtgtggctgagtctgaactcattgcttgtgcctcctacagggaaaatcctgctgtccccaaagaaataccctgccctactcaagatggttattgcattgcccctgaggctcatgatcttctgtaaggccaggggttcccaacctctgcttccaatctgccctaaagcacccctcttcctgtcatataatctcctccaaatcaagcatgaacaattttctagaccagaaatcagcaaccgatttattttattttttttttttgtgatggagtctcactcagtcacccaggctggagtgcagtggtgcgatctcagctcactgcaagctccacctcccgggttcacgccattctcctgcctcagcctcccaagtatctgggactacaggcgcccaccaccacgcccggctaatttttttgtatttttggtagagacggggtttcaccatgttagccaggatggtctcgatctcctgatctcatgatccgcccacctcggcctcccaaagtgctgggattacaggtgcgagccaccgcgccctgcccagcaaccgatttttataaggggtcagataggatatatttcaggctttgtgggtcatactgtttctgttacaactactcaactctgccatggtaacatgaaagcagccagagacgatatgtaaatgaatggctgtggctgtgttccaataaaactttatttatagactctgatatttgaatttcaaataattcgcacaagtcttttagtttgttccaaacatttaaaaatgtaaaaaccattcttagctcacaggctacacaaaaactggcagcagggttggagtttgcccactcctgctctggaaagattgctgtgatgctgctttttctgcagagtaaattgggatctgaccactagagtctccaagctggctgtttttttgtagcatctccaatccagagcagcttttcctagctcctagtaatcatgcagtttctgcctatagactttgacttcagttttctcctctattcgtgccatccttccccctgtgatctaggaaggtgcgtagatggaagtcccgttaggaagccaatacttaatctataggtaaaacgtggatttttttctttctggaaaatatctttattatttaacctttttctatttttgagaaatagaattcgatctctaaatgaattaaactgactgctaactagtgtgtaatttttggaatgaatatatttgaacttcattcaaatgatatttcagattattctttttcttcttgagattgtattgcaaacagaaagataactttggcaagtaaattaaaggattgacaaaacaaaagtgtgaattaaggcaaaaaatagatgccaatgcctacttttgttgttgctgttcattcattcatttactcatcacgtatttgtatgtgccaggcactatatttcaaagcgagatctcactttatatctatcttgacatacaaagacgagtagaataccatgcttgcattttagagaactatatgggagacagagaaccaatgagatgtatctttatatatcaactcaatatctgttggtcacattgtaggacacgtagagcacaactaatcattggaagaagtgtctgttttgcatggtccacgtgatatggtaaagcagcacgttctatagagggcagagtcttgggccatttgccttactcccctgagtctttaaatctgtaaagcgagatgactacattgcagatttgtggtgaagactaaatggaaattcatatgcatacataaggtaatgatcaaaacataggccataaaaaattcacatcacgggataagtttggttttcttattgataagcatatggctttctagtaatgttacattgagttactagtaaatttacttctgagtcagacatatttactgactgtgtagtatgtccgtgtggctatacttcacattgtgtgcaaaacggaggtattacatgttctcacttataaataggagctaggctatgggtacacaaaggcatccgagtgataataatggacattagagattcagagtgtgggaggagggtgagggataaaaactacatattgggtacaatgtacgctacttgggtgataggtgtactaaaatcctagacttcaccactataaaattcacccgtgtaaccaaaaaccatttatattcttaaagctaatgaaataaaaacagcaacaatagaggtatgtaggttaaggtctttctgttgggttgcttgtcaaacatctttttattattattattatgctacagattagaaagacaatcttatgcaaatcatatgagatcatccttactgaccgattttttcatctttttgtgtctgtttagatatgaacagtaatggcacatattttggttatgagtcactcagaggactgtggattgaatgaactgtatccatccccatcatgatgtacagaaccaagtctcttcactagtaggtatttttttaattaatatcatgtacacagttatatgttgagattttcaccagagtacctacttttataatgaaaaatgtgtaaaacacatgtattagtgtcgccggtatgaaatatggctagatctagtctatttctgtatcaaccaattgtaaaatgaagaggcatgctgagctgtatctattaggtataagtatataaatgtggtaattatgtatacctatataggcagaatttagaagtatagcatcttccctcttttttaactgaattaagaaacgtcactggacagtttcgatgtcttctggtcaatatcatatagatctggtgccaatgtaagcttaaactttttaccgagtttatgctttgcaacagtttaattttattatacagggtatttgatgtgcttccactcacagatgcaccatattaacagttggtgtatgatatttacggtgttgtggaaagaaaattaaactcagtcagaagatgttaatttcatttcagctccagcatttatcctcatactagtcccctaatctctaggcctcagtttcttcatttgaaaagtgaaaggaatcgtttctgctttacctagttcataagatttcctttgaaggtcaacagaggtaacggatgtgaaattattagctaactctcaaactctgtaaaaataaatggtgttgtctgtggtcaactaacagcacaagtagagagctggaaaaagttgtgaccataattgtctcttccaattaattaatgcagtctactattttatatgctacttgcctaagagataaatgataaaatcctcattaattttaatttatgacccaaattaatttttggtatatttgagaaaattatgtttaaatgatatatgaggaaacacatgtttctcacacacccatgcacacaccaatccccaccaaccataaggaatttctgctgctgcttctctccatcgtgtttactcttattagattttgtctattaggtttttacacatgaaggagaaagatatattagatacttcttatgtgtactttagtttcaagatactaaggaaacaatgtaggaatttggtgagattgtaaatattatttaaatatagtatttaatacatctgttaactgaaatcattttaacatcttctatgaccattctctttagctaggagaatacagctagcttgtttaaaatgaacaactgaaaatgtaatcttaacaaatacattcagtaatattgagaaagacttttccactaaatttaaacaagttatataaccaggcttatgcaatgaaactggtttgcaaattctaattccggaaattagatatgattttcactaggagggcagtggtctgttacatgaataaaatttttgcatataaatggaacgaaaatcttaataacaggtaacatattcactggctaatattgtagcatagtgctgaagtatgcaggatctatagtcagactgcctgaggttgcaacccagttccaccattttgtagttttgcaaagttggacaagtcatttaatttctctgtgctttagtttgcacatttgtagaatgagactaataaaaagagatctatctgattgcataggcttgttgtatggattacatgagttaatatggacgagtgtttgggagcagtgtgacacttactaagttatcagtcagttccctggggagtgtgggattatcctgatgagcacagattttagaatcagaaagccctgggttcaaagtcatttattaattgtgaagttttcaaaaacctcagtttctgagaaataaaagggaaatgattatgatatagtccatactgcctttgttcagatggcttaacacagcatccacacaaggaatggcagctatcccctttgtcaggcattgtaaagatataatcacaaatcattgtatagtatgattttaaaataatgtaaatgagagaacttctgaatttgaaaatgtccttgccacgtgttatatttaaaggactttcataaatgtgctcaattattgatttattttgttagattcagaatttcaaaaatgattaacaaatacttaaacaacaaaatgcaaacatagcttgagtatggaatactgaaatgacaaaaaaaagtggtttattaggccgatcaaggaatatcaaatgaatgtttaatttattttgaattttggactgtcaccatgtttaaaatgacttttttttttcaggagagaaagagagcaaaaaagaaaggaggtataaatgtagaaaatgtttcacaaagtgatggggagtaagggcttgaactttcactttcataatcatgagttctatatcagacgtacgcttgtttttattatgaatcaacttaagatattgtcctttgagcttacactggacaaaattcagtggttttagtgggtgacattttccaaatgagtcataatttgttcccaaggtggaaagtactgataacttggggcaatatttagagtcaagagcatgagcccatgttttatgtccatctctctagttgagccagttgctgggctgacatgtatcactcagaccagaaagccaagtcttattccctcacttcttccttataaaccatctaaaacaatgacagcgtttggtttgtccaactctgtccatctctgtatgcagaaagtctttcacatataaatttaatctgacttatctgacttgcttataattcagattaaaatgttatctttgactgctttgcacacacccatttattcttcttcttgtttatttttgcaatagcttcttcagcctttatagatttttcccctgatgaggacagtagtggttatgggggaagcttttgggcataaaggctttgagggtgcatttcttggtaagaatctacatgctatggacatgggtacaggcctggttgctgtgttgctgtccctttgtgagggcctgggtgagagatgcccatggcactgatgtgatgctgtcctgccctcccagggcctgcagcatgccatacttctagcccttcaatgcagccaagatgcacattatgaagtctcgtattaggatttagaatgtaataaaaggaaaaaagcaaggttatgcggttggaatgctggccctactgtattattagtccattttcatgctgctgataaagacatacctgagactgggcaatttacaaaataaagaggtttaatgaacttacggttctatgtggctggggaggcctcacaatcatggtggaaagcaaggaggagcaagtcacattttacatggatggcagcaggcacagagagagcttgtgcaggggaactcccccttatagatccattagatctcttgagacttattcactaccatgagaacagcatgggaaaaacctgccccaatgattcaattacctcccaccaggtccctcccacaacatgtgggaatttaagatgagattttggtggggacacagccaaaccatatcacctactaaacagacagatttttgtggatttctacttatctttgtggttttatggtcattatatatatttgtgatgtttaccttaacatcacaaattaaattatgtatgtctttagaagtctccttctggctggatgcagtggcctataatcccagcactttgggaggctgagatggtcagatcacttgaggtcagaagtttgagacctgcctggccaacatggtgaaaacccatctctactaaaaatacaaaaaaaaaaaaaaaaatagccaggtgtggtggcacacacctgtaatcccagctgcccgggaggctgaggcatgagaatcactggagcctgtggggtggaggttgcagcaagttgagatcgcaccactgcactccagcctaggcaacagtgagagactccatctaaaaaaaaaaaaaaaaaatggagtctccttctgaaggagactgattaagtccaatatctatctgatactacttaaatgagaatctctaaaaactaaagcagaatgacgcatttcattcagtaccacagggccagatcatggatcagacatgggatattcagacctgaagtctaatgtaatttggagacacgaaatagatgaaatctttactacagtgcgattctgagaatagcccctaactttacatataacatggtaaagggaagagtataagcctaggaatggaagtgtattcaagtaggctgtattgtgggccaagcagaaggtgagtcctttaagaagagagcctgctcaatggtgactggaagtggaatcaatgagctgtgaatttcccagagaggtttatgtgaccctctctcacatgttggctgccaatctcctctgcctccttgctgaccaagccccacctagcagcagcaagccttacctgcgtgccatgatcccaggagcttccttgtgcttagatgtactgtccgttaatcaaactcatgttcttccttccaaactcagtttacaggcacggtcatctgtgaaaacttccttgatcttccccttaaaattcactgtttctttttctgctcttctgtactgtgtgcatgcctatattataaatcatgcttacttcttttgcaatgctttgttgatgtaccaactacctcactatggtgttagctggttgagggcagttcctgtcttgttcattcttgtttttcctgggtccagaactcaaccaatagttactgataaaattaatgattcaaatgattaatgatacattttatccttagattgcacaataaataattacatttggcatgttacagagatttctatgaaatgtctttcaatatggatgttttcttaaaattgttattaatataaatctgtaaaaagtatgaccagaaaaaaatgaaaagtggcaaattttaacttaccgtgatgtttatatcattttaagtatttttagcaaaagataacaggagttttgaaaatgtgtatctgactctactaactaccttcttaatttatcattaagctctattgattgattgattgtgtccctaggtgggctagaaaatttgatttttagaacagcatttcaacaatgatgagaaattttctgacctcatgttaactgaaggtggaatgactgcattgctatgagttagtaagaaaaatattttaaatagttcttaaggttttcttttattataataactattttatttcttttgattgcttttgttcaacattccaggcttgaattcatcactgttttttaaagtatacatattaaagcatatttacataaatataaagcacgtacatgctatataatttatatatatacttcatatgaccaaggaagtcccctaacattagtcatttgggaaaggtggaaaatgcatataagtgttaccattctttttttttttttttttttttttttttgagagagggagtttcggtttcactcctgttgcccaggccagagtgcaatggcgtgatctcggcttactgcaacctccacctcccgggttcaagtgattctcctgcctcagcctcccaagtagctgggattacagccatgcaccaccacgcctggctaattttgtatttttggtagagacggggtttctccatgttggtcaggctggtctcgaactcccaacctcaggtaatccacccacctcaacctcccaaagtgctgggattacaggagtgagccactgcacctggcctatgttattattattgtagatttaagctatttgtttaaaaatagagcaaaaaataactgaaccaaaaaaaaaaaaggcctctgtgtcaataaatgagtagctatacatcactcagaggaggacttaaacttgtttgatttaaatgtttcttcttgaattgtgtgattttaactgaaattttatcatacaattgtaacatgaaagatcattaagtccactaaaacagtgttttaacacatgacgcccatctttgttgcttgctgtagaccaattgtatacagtgaagtcaaacatgggctaatgagatagagttataagtagcacaaattatgtcaagccactcagatttcacagatggctgtagataggtaactgtaaagcattaagctaataaagacaatttttaagagaagaaaataggtgataggttactccagttttcagcacataagctattgtagattaacatccatcagtcaaaaaggggtaatgtttgaatgaatcatatataccatatcaagagtattcatccggttgtgtaaccagaaatataatggaataatgtaggtattatcacattattaaagctttgatatgctcaagtaactatggtaatacagcaataataattactattgaatgaaatatggctatttctttcaatatatatgtatttaatatatgatatatatttattatattatgatatatgtcatctatttctgatgtgtatagatgatatgtatcgtatattatatatgtatagatgatatgtatcatatatatgtatagatgatatgtatcatatatatgtatagatgatatgtatcatattttatatatgtatagatatgtatcatatatatagatgatatgtatcatattttatatatgtatagatgatatgtatcatatatatgtatagatatgtatcatattttatatatgtatagatggtatgtatcatatatatgtatagatgatatgtatcatattttatatatgtatagatgatatatatcatactttacataaaatatatattttatatatatatatataaacgataagctcactgcagcctcaaccttttgggcacaagtgatcttttcaccccagtctcccaaatagctgggactacaggctcatgctccacacctgactaatattattattattattattattattattattattaattatttttgtagagacggggtttcacttaattgccccggctggtccccatttcttgggctcaagagatcctcccttcttggcatcccaaggttttgggattgcaggtgtgagccaccacaccctacctggaagaaatattttttattgtttcaaaagctaatacctgacaaaatacctgcttgtttcctgatacctttatgagtctccattttatgcattcgaagatgaacatttctggattactattttctaactttctttttaacgaaaagacttccagttttatgttgaaatttgatcataacaataatggccaccataccctcagctagtaactggagggagttcctagccacgttgtctctcaatcgtcgcaagtctgcaaggactccattatcatcttccatttacaaacgaggagacgtatactgttctgtgtacactactgattgacatatgtgtatgacctaaatttgtaagaatgatttccaaagactttgtaaggaagtcagcctcaccactataggacagacacataaatatggaggcatataatattttcatgtggggaaatagagaactaattttatttttgaaaataaaattaatttggaaaatatgcttcaggttaacccttgctaatttaatattctggagagtaaatagcttctaaactcataattaaagatttcccctactatgcttccgtgggaaccaatgtgcatacaaatgagaatctatatctatttggagacacattctcagttaggatacaagcaggagactttcaggagaatgcattacccatttttaagattgaaaattttgttcataaaaatcaaataatatcatttaacatgttttcttatgtcttgtttctttcacttgaatgattgatgtaaatgccgtgaaatcaatggacatgtcctataattgattgattccctacagtggggactaggattcttggtctcaacaagtgtcttttctatcccatcccgctcccatcaaaatgctttcacatgaactatctcttttcagtttaattagttgaaaataattttgctgatttatctcatattttgcttctatgatggagatataattaccggtgttctattgtccctttagatatcccctcaactatgttatttatcccaacaaggaaaatttaaatgtaggggcaaacaagcctaggaaagggagctacttttgaagtagtggtttccacatctgttttttgaagcagagtctcactctgtcgcccaggctagagtgcagtggcatgatctcggttcagtacaacctcagcctttcaggtttaagtgaactctcgttcctcagccccttaaagagctgggattacaggcatgtgccactacacctggctaatttttttatttgtagtaaagacaggtttcaccatgttggccagtctggtctcgaatgcctggcctcaagtgatcctcccacctttgcctcccaaagtactgggataacatctattttttaataaagaagataattatgatgttgtgaagtcatttgaaattcaaacattaaattatctgaaaagaaagtcatgttgtagatgagtttagtttaaatatttgaagccagagaattcgagtattctatttattcattcagcaaatatttagtgacctcctatggtatagcaggccctgggactacaaactatagacaaagtgcctgtccttacagaatttacatttctaggtagctgttagaggtgggtaggggcaggatgtgtggaaaggcatagaatgtgtgtgtgtgtgtgtgtatgtgtgtgcacgcacgcaggcatgcagaaaaagagtgatcattaaatatatgtatacaaaaaaagtaataaatttattttaaatgaaagcagctccttttttatagcaaaattgcattcaacttttctaaagcatagtttgagattacaaaatttgacatttttactcactaaaacatcatattttgatcattactaaaaattaagtttttgataaaatacctattgtaattttaaattggttcatgtatttctttctttttttttttttttttttagatggagtctcactctgttgcccaggctggagtgcagtggtgcaatcttggcttactgcaacctccacctaccatgttcaagcaattctcctgcctcagcctcccgagtagttgggactacaggcacgtgccaccatgcccagctaatttttgtatttttattagagacggggtttcaccatattggccaggctggtctcaaactcctgaccttatgatcctcccaccttggcctcccaaggtgctgggattacaggcgtaagccaccgctcccagccctggtttatgtatttctaatcactttttaaatcattctaaaatatttgtaggtgttgtagaatctaaaggaaaaatcctcaagattattttgtacatcatcagattgcactgaagagtggttatgagggatgatgggggccagaaaaatgtgagcactctgagacctaaaggggaaaaaattgttgccctttcaccaaaggaagaaaagcaactcccagttttttggttctttgattaaagtttaagtcttctctgtgctgaaacatggagtcacatggaagtgttcagcttttattatttaatcacatggaagtttggttgtggaactacagtcattgattcataaacattaccgtattagaaataatatgggatgtgcacttgagaccttgtgacaaaatgaggtagaaggtgggactctgcttcagaggcagggctcagacaccagaacaatgaggacttgctaaaacaggaatggggcagaagcagctttccataaggcacgccagcagtgtgctgtgtcagtttaccgttgccacggcaatggttactgcctctttccatggcaatgactggcaacccagaagttactacccatttcctaggaatttgtgcattaactgccccttaatctgcatgcaattaaaagtaggtataaatatgattaaagaactgccctgaactgctactctatgcttatggggtagccctactctgcaggag

SEQ ID NO: 472 - DNA, 22100 bp, Homo sapiens
ctctgctttcagttagagtgtgtgccacttcatcctacaaaagaaaaaaagcaaaccttcaatatatgttttgagcactgataataataatttcactatttctctaaaattggaagaggttaagcccagagattgaaaaggattttaaaacacagtggcatgcttcctttaccactcagcattctctccaccaaaatacaaaaaaactcaaattaatgatttaattcagatgattgtataagttcatataaattcactcatacttaatcaaagtatatcaataatgatacaaaaatcagtcagaaaattatcagggacacagaaaattaaatattgagctttcctccttgaagggaacaatttatcaactaatatttctgcatgaggtaatttaatatctccatgtttgtaatacattttattcagggggatgaaaggatatatttcccaataaatatcaaagaatttaaaagtctcctactttaaataaattagttattagaacacagaatacacatgcaatatttagttctaaattacacattttagaaatagaaaggaacagagtataaaaatatatacctttctgcttgtggctttttaatttgcgtcttaatttttaaagccaagttcttgctctgttgcccaggatagagtacagtggtacaatcacagctcactgtaaccttgaactcctggactcaagcattactcctgcctcagcctcctgagtagctgggattacagatgtgaggcaccatgcccagccttatatgcttccttatttatttttttagagatagggtcttgctatgttgcccaggctgagctcaaactcctgaggatcaaggaatcctcccgcttcagactcccaagtagcagagactacaggttgttttttttcctttggttgggggcgtgggtgttacacatttttttttatttcaataggtttttggggagcaggtggtgttacatgaataagttctttagtggtgatttctgagattttggtgcacccatcacctgagaagcatatgctgtacccaatgtgtagtcttttatgcctcaccctgcttccatcctttcccccaactccccaaagtccactgtatccttcttttgcttttttgtcctcatagcttagctccagagactacaggtttaatgtgcttttcttaaaaaaaaaaaaaaaaaaaaaaaaagctcacaaccctcctactgtaggtgatcattttaaaatgtaagtatatttcaaaccaaaaataaactaagaatgttttccccaactttgggcataaatctcatattgatatcaaaagcaaactagtgttttcttcaacatatggagaactggagataatgtttcatatttcaaaagtaacactatcttaaagaagaaacgaaaggaagacaactgctgaaacgaacacagcatctctgttcttcacttctggcaagatcttaaataaagcccttgctgaatcaatttcttaacactgtcagaaaatcaaaattagatggaagaaagacatgaaaagcaaaacatcaggacactgcattatatttgttatctttataaaaatatttgaccttaaactcgaaagataatgataactagattaatcaaagaagctaagatcccacaaccattcaaagaaggtaagatcaattgtgtctgaacagaaagtataattaacaacgagtgaaggaaagcataaacatgaaatcatctcagtcttatttgttttataggagtcagttttaagtgctcaatttgaaagccaatgtcatatcgtactatagttcctaagttaattagaatagcaaacattgtaaaacaaaataaatcagaagcagaaatgacaccagaacttactgatttccatatacactgtgcctaacataatggtaagcatacagcagatacctaataaatgtctattgaactgaattgtgtatcataggaaagaattccaagatgtcaagtgtgcaagagttcattcatccatccacccacccacccacccaccgacttcttcaacacatatgcaacaagtatcttctgggtattcgtctgcacatcagagacaggacactgaacaaatagacaaaattctctgctctcatggagctttagttctacttacatggtgatcagtgttaatgggaaaaaccagagaaggggatactacagttaatgagcatcacagagggaatatgaaatacataattaagcattatacaagtggctattttgtgatatactgaaccaagtccattcacttaaaaaaaaaactgctgatgtgcactcactaattggtaagaacagtgctggtataaggtaacttaataaaaaaaataagatcccattgctcacagagttcataggctagtggaaaacacaaacaagtaaattatccaacttaaataattactctttctgataagtgatattaaggaaaaagtggaggttatccactattgtcaacggggctgtaagggagaaccaatgctattggtagagtgtaagttgggtattgtgatggtgtgggacatagagaaagtgatggggtgggggtgacatgtttgtgaaagtctactcacgttcttctaagaaggatcaattaggaaagcattacataaccccaagagagaagtgaggatggcttggactactatggtggcagcggaaaaagaaaaaggggatagttctgagatataaagttaacagtgctaatataaaagttacatgcctccaacatgagagtgaatcacagacattttaataggcagttcagaaagaaattcacagaagataacatctacctgttgtggtttaagatgttaagtgatctgggtcaagaaattaggaaaagactagagaaaagtatgtatgaaatttatttagaaatagaaaagatattctagtgctttgaatattttcagtggggtattacattctattttgttaaaacaggcttatcacgcataatagttatttttctaaatcacttagtaactttcatgagggaagacttttctaccccctaaatttgtaatctgaccacatccaaggaaccaagtaaagacgtatggaggcaaaagcaaaaacagtatttgttatgagaatggaactggaatgaacaccatgtacataccaaaatgtattttctaacatattttacagctgatcagattagaatttcttcccattaatgcatatttaatggtactgtatttcacatactaattagtttctgctatgaagataaggtatgcgcaagctaaaaagtaaacacagatgctaataatttttaattacagttaaaagcaacatgtcaaaacaaaaagttaaaaataacagtagtaaaacagtgactaaaacaatgtgatgccttttaaaaaatccatctgttgatcataattatgaagagttctagaaatgcttggggatacaatgtatttttttcatggaaaagcttttgaaatacaaatttacatatatttatccatggtaaaatagtaaataatgaacttttaaatctaatttctttcatagaagaattagggggaatgggattttatttcttcaggcagaagaatagtctttttaatattttattttcccaatcctctccaatttatcattcaccctctattacacacgatctaaagttctcctttcatttgaccctctcgatgttttgtggtaattaggttatttgagggaatgaggtgtaggagagggcaaacaagaggagaaaaagaaaatttctacccttaatgatcaagaacaccatgagtgtcatctcctttaatccctgcaccaactgatcccacatctaagttcaatagtaaaggtcatttctacttcacaaaactgcctcccatcttcaaacaacctactatctacttcactaggtactctgctcacattattttctccaaattgaccacaagtctagttgaaatcaagacacattccgtctaaaccatttcctccatccacccagagctataaatgagacctagaggaagacacgaatcaggtgggagaaacgggaagagggtagagaaatgttactttggcacatgttttttcgatacataatagttgtatacattttcggggtacatgtgttgttttgacacattccatatgtgtaatgaccaaattagggtaatggggatattcatcacctccaacctttaacttttctttatgctggagacattcaaattcttctcttccagctattttaaaatacacagtaggtggttgttaactatagtcgccctactgaactatctaacactaggtcttattacaactgtacttctgtacctattaatcaactccatctccccatccccctaccattcccagcctctaggaacaaccaatctactgtctatcttgatgcaatcccgttttttagctcccacataagaacaaaaatgtgcaatatttgtctttctgtgcctggcttatttcacttaacataatgggttccatttccatcaatgttgctgcagataacgtgatttcattctttttatggctaagtaatattccactctgtacatatatcgcatttatcctttcattcattgatgggcacttaggttgattacatattttggctgttgtgaatagtgctgcaataaacctaagggtgtagatgtctccccgatatgatgatttcctttgttttggatatatatatggtagttctatttttagtttttgaggaactttcatatggttttctatagtggttatactgatttacattcccaccaacagcataggagagttccctttagcatctgtgatttttttgtttttttgataaaagtcattgtaactggggtgagatgatgatatggttaggtatccacccaagtctcatcttgaattgtaatccccataatccctacatgtcgagggagagacctgctgggaggtgactgggatcagggggcagtgtcccccacgctgttcttgtgatagtgagtgaattcttaggagctctgatggttttataagtgtctgacagttcctcttcacacactcgccctttcttcgcctgataccacacaagacatgcctcttcccccttccatcatgactgtaagtttcctgaagcctccccagccatgcagaactgtgagtcaattaaacctcttttctttataaattacccaatcttgggcagttctttataccagtgtgagaatgaactaatacagatgatatcacattgtggttttgatttgcatttccctgatgagtagtgatatgacacacttttacaaattaaacaatgattaccagtgattattatttacttttccactgtctcaacaagccatatgttagcaatgtatacttttttttttcctgccagaggagacatgtcacacttatcaagctctaaattttgggttctaacttttgtttcttgaaaacttgagcactggcccagataatgacttctaatacttcttccattctccagctgtcagactgtcttctgttccttgatttctattcctttttttgaagatttctcaccttgatggagatgaaagcaccgttgttctctgttaactacaaacattattgcgcctttctcgagtattgtgtttgatactttgttcttgatgctccagttccaaatattccttagatgaaggccaaatgaactcctttgacttccatcatgatataatcactttggactccagtctttcttctgcctctctcatacgcggtattgggacaagttcatctctaccctcttaactctatatttcacatctaaagataaatttacacaaacatattgactaacaccattggaatctccctaaaaactcagctgaatcttctgaggcctctttcatccatcgctacttaggtcactcttcaatttctcaggatggttgtttcaaatctttcccaggccttcttccttgcctggtaggtatacttaaatgtacacactaacccttacctagtcaagctactaagctaagactagaacccaggtctgtgctgacttccaagcacaggagcttttcatttatttgtctctctttatctcagcctcactcgttcacactttcaaaatgcgatcttacttcctactcagaagagaagccataaacgtaacatttaacacatttgatcactccttcctcctgaaaacgtgttcttcttttgggtcccaggacatcctaatctcttcatcttcctcctcttcagtggttgtctttccgcagtctcatttgctgcttcctttgctctgaaacccttattctgtaagcatctccaggactcagtcctcagaattctcttcactgggtacactcttcctttggtaaactcattcagactatggctctaatacaggatatatgctgacagacttccaaatttatacctcaaatctagacttctttcctaaacttaaaaaatgcctatttggcatggatgtataatcagtgacataaactggagtatctaacaaaaatagcaaatttgacatatctaaaacctaattccaaatctccccttgaaaagtttctcctgcagtcaacttcaatgtagtgaatggcaataccatgctttcagttgcttagaccaaacatcttaacaatgatctccaactccttttttttcccactcatactctacattcaatctgtcaagcaatcctgttggttcttcatcaaaatacacccaaggtctcattatcatcactacctccattgctactaccctagtacaagccactatcatcaattatctagattactgctgcaattagcaaactatctgcttccaatccacagtctattgtcaacactgcagccaaagtgatactgaaaactagactgtgtaactacacggcataaaaatttccaaaggcttcccacttcattcacagtaaaagccaatatccttacaaacatcctacaccattcttgttccacaccatgctagactcctagctattcaaagaatgtgttagaatgtgctaagtaagctccctcctcagggccttctcaattgctatttccccttgctggaacattcttccttcaaaatatctaaaggacttgcttcctgatctccttcaaatgcttgctgaaatttcacctttcagtgaggccttccatagtcatgctatttaaaactgcattaagtccccaaaatcgctaccatcattattccttatttccctactccacttttctctgtaagtatggattagtttattacatactctatggtttatttattatgtgtattatttattctctaattgctgacttgaataaaatttcccaaaggagaggagtttgtcagttttattcgttcaaatggtcccagtgcctagagcagtacctagcaaataattaggtgttcgacatatatttattgaaataatgagtgaatgaactagtaaataacgaataaccttggtgcatgctgctgaagaatagaagctacacgaactacatgaaataactctagaacataaatcactgaaatcatactcccaatagaacaatgacagttgatgaaggtatagcagatcaaaccattatctgcttcctacaataaaccacaatcgttgatgcaatgtttaatacagaggttcaaaagaatatgaaagaagagaacaaagtaactggctgatcacgttaagagatttcagttaagatccaccagtaagaacttaagagtccaaggaaaaagagatgccagtaatcaagcaaacgcattgggttattttaatggacttacgtgcagaaaaagggtaacacatcaggcctgggttgcccaaactctacacattcccaaaaaagtcagtcttcagaactggcgccgttggccaactcctgggaaatgaattctgagcctctgaaatattctgcctggtcagagtatttttgtatgctggagatcttgggccacatggtaccagtttgactagatagtttatgcaaacaacaggatgcatgattaatacttcgtgcctgattttgctctgagaggttggaatctgagcatctcagggcagtcatgaaggtactgcttgcctatgtgactgacttccaataaaaaccctggacaccaaggctcaggtaagcttctttagttgacaacacttcactactgggagaattaaaattaaccatcacagatgcacttatgtgtcaacttgactggattaaggaatacctagagaactggtaaagcattactaatagctgtttctgtgtttccagaggagactggaatgtgaattgatggactgagtgagaaatattcacccacaatgtgagcagacaccatccaatcaactaagagcccaaataggacccaaaaaagcaaagaaaaggcactctcctggaatggggacactcctcttctcctgtccttggacatcagaactctaggctctctgacatttggactccaggctttataccagcaactccctagtttcccaccaaaacccaggttcctggcccttagcctcagactaagaattacaccatcagcttcccagggaacttggacggagatacgttaccagcatcccaaggtctccagcttccagatggcctgtcttgggaattttcaacctccataatcacatgagccaatttcccagtgaattctctctcatatatgtatatgtatccgattgtgtctgtctctctggagatccttgatttcaccacatcatccatgtgactccactggaagaagataccttaaagcttgcacttggtttctccaggattttgctctatgtggttttccctttgctgattttaatctgtacttttcactatcataaacaataaccatgagtcttttctgagtcttgtgagtcatgactcactgagcctgagagtggtcttagggacagctgacacagttgccatcataagtaggactcattaaagcatggcaaaaacattgtttcaaaaaaggaagaatgacagggcagacaatgacaaactctgatgcctaaatgggtatacagtcaccaatggcatgagacggcagctgtactgtgctgttactacatatagaagttgtcaatggaatttagaaatgacagaccaaaatctcaaggacttagatcactggatacataaagaaatgcaaaatgatgagaaacaagctaaatacacaatccactggtaacgtgtacttttttccccacatgtaagatttttattccaatttgatttgcatttcaaaggaaattataaaatgtatccactttttttaagacaaaaatttaattataaaacatgataaacttccaggttaaaattaggctaactgcttggaataacaaactcttaaatcaccattttccacctccacaccaagaataaccatttaatcaaccatactgtaacagcaggatagcactgagacttgagtaaagaggaaaactaaagagctcttccagctccaaatcatgaacatttttatgccttcttatagtggtgaacggcaaccacatcatcaccaaaagtaagtcataaccatttcaccatacttaatttctcttataaaatatgtttctttgtcatcccatttctgtatgtgaatgagtttgtctctgtccagactaacaacaaacttgcagtttctgtcatctgtagtggtttcatcaaactcttctcccagatggaaactaacctctgtgttcttgaacatactttgaatcctgatcaccaccttttgtcttcttcttgactgataatcactcttggtttgtccacatttcccacctgcctagtgacaaagcccatccctagagccttcatgtactcatcaaagttctgtcggtcagcttccaggtattacagaaagcctcctccacccttgccctttccccactttagagacagaagtgaggagctgctggtcttattgccactgcagtttgtgtttttttttttttttttttttttttgagagggagtctcgctgtgtctcccaggctggagtacagtggcatgatctcagatcactgcaacctctgcctcctgggttccagtgattctcctgcctcagcccctcaagtagctgggattacagacgcatgccaccaagccaagctaattttctgtatttttagtggagacagggtttcaccatgttggtcaggctggtctcaaactcctggcctcaagtgatctgcccgacttggcctcccaacgtactgggattaccaatgtgagccactgcgcctggcccagtctgctgtattttaaaacagctaaaatgaaagtaagagagagtgttaaggaaatcctgatgctcaaaaagcttggattttggttagcttgagctatggctgttagcctccaggataaacccaatggaaaattatgctgaaaaaaacagacagtatatctatggcctttgaccaccaggaacattgtccaaatggtgggtgacaaaaccaagacagtactggaagcaggggttatgtgtgaaggagttatcttgccttgtgaactggtattcatcgggttcctgaaaaacatttaagaaaatagattgtgagagtgactaacttgggagcagtatctttgattctgaatgttgcagaatgaagaagtctgcttggggttgatgcaggaaccttattactgaacaatcatggattgttgtacatgatccaaacacacaatagattgttcctaaagggacagctagtctggtggactgggtaaaagccactgtaaaatttgtttaccctgaaaagggaaatggtccttcccctcctttaaatgccaagtggcactcctccatagatgacatagctggtaagctgcatatgcaaaccatgctggattaacttcatggtcatcaggatgtttgttcatccttaatatgccctttaaatcatggtaaatactgtgactgaaggggccccgctaggcaggcatctgatataactgctgcaaaatctatcaatggtccaagaaatgtgtcagatttgttgtctcagcttcttaatatgggtcttacagatgctaagaaaataagactgaatcacaagtgaatgggtaacacaaaacagatagtcaacgaagtcccaagcaggatgaagttttaaacggttactaagagatgggatgaataaaatggacactgatgttaacacaaaggtcttaatgctgcactatcagaagttaggtttaccaatgggagcgcctcttagtcccccaacactgaagggccctaaacaaacactctatgcaccctaatttcaaagaatgcaccaagctgggaagcaaaaatgacaatgaagaacctcagttcaaatcatcagaggtgatgggctaccaaattaatcaggatgaggactgacacagaaccagggctttcttttaactaatctcctagtagggactgaaggccatatgcacacctgtaggtacaatagaaggtaaaaaagaaaccttccaggggttcctgacatagaattcagtgcctctgattccaaaacctattggtaaaatcctagcagaggcaataactagaaagacaggatatgaggatgaaatggctgataggattaaattaaaatttggatgaaaattagtatgtttgaatgaatcttggaagtacttgcatccacattacctgaatatgttttggggaaggatatgatgtttgaccagggaaaacttcagctactatactgcagaaagcttgttagttttcccttcagtcagaacaggctaaatgagaatctgtgcaacttccccagctcacataggttgttaatttgaaacagtatcatggtggaccaaaagagatttagcacatgaattaatgacatgttcgacactggagtgctgttaccaacaagttctgtgtcgtgcatgaaaaaggtgaattattcatgaaaactcacagcagataatcaagacttgaataatatagtatcatctacagcatcagcagtctctgacatggtttcagaagttctcaaaataaaacaatctaaaagagacatactcagccagacatagtggctcacacctgtaatcccagcactttgggaggccaaggcaggaggatcacttgagtccaggagtgtaagactagcctggacaacatagtgagaccctgtttcaattaaaaaaaaaaaaagagagagagacatactgattgatcttgaaaatacttttttcttggtcccaatctcaggaaaaaaacaactgcactttgccttctagtgggaatgatcccaatttatacttactgcagtgctgcaggtttatctgcatttatcagcttaccattataatttgtttcgaagggattctgacttgatacaggtccagaatacaataatatactacactgatgacattatgacggtatcagaaacctaagaacaagctagggctaacttgaaaatagtggtggctcacaggaataccacaggctggaggataaatccagcaaataccccagggtctaaccaaactgtgaaattcttacgaataacctgggcaggaaccacccataacattctacaggcaactaaaattaaattgctcttattacataaccatgaaagtaaacaagcagcattcactgcagctggtttgcttgagttttgcgaagaaaaattctgtatctggggactagtgctaaatccaatccgtaaaactacctgaaaggacacatatgaatggaaacctaaacaacagcaggctattatctaagttgcagtggctcaattaatgcctttgggtccttacgatatacactcagatatgattttagaagtatctgcaactcagactggagcttatggcaaaaagcccatgaatgctgtccagcagtaaccactgggaccatgggccagacaagaaagtatagaacacatcattagagagacgattattggtttgctcccgggcattaactgcaactgtctttatgactgaaggacataacataatcctaaaacctaaaatatccatgtcttgggtaatgtcagagaaacactctaacgagtaccaataacaaaatgaaaatggcttaacgggaatgtgctgaggaatgcaagaagacacttaccatattcaatagaagaaaacctttttttttttgagacagggtctcactttgtgtcaaccaggctgaatacagtgggggcaatcacaactcactgcagccttgacctcccaggctcaagcaatcccgcatctcagccaaatgagtagctggtatcaccagaggcatgccaccacacctggctaatttttattttttgtagagatgggagtctcactatgttgcccaggctgagtctgagtctgaactcctggactcatgcgattctcctgccttggcctcccaaagtgttgagactgcagccatgagtcatcacgcttggcctcctcttttcttccagatcaactttggaaccatctgtaaagctaccagatcctattgccacatcctactgttcaaatgctagtgtcttacaaagagctctcactgaccaccaaaaagtggcttgttttacagatgatagcagttcaaaggtaatcagccagcatcctgtttggaaggctgtcacactataactgactgatgtgaaactgatgaaagaacaacaaatcagctcaaagggctcaattgtacattgttctccttgcaatgatggatgaactaaacaaacataaccttcatgtgtggatgtacacccatgaatgggctgtggccatttgcctggccatatggtcaggctgacaggcagtgaaaaactagactattaaatggatgtgccaggcatggtggctcacgcctgtaatcccagcactttgggaggccgaggcaggtggatcacctgaggtcaggagtttgagaccagcctgaccaacatggtgaaaccccgcctctactaaatacaaaaagttagccaggtgtggtggtgaatgcctgtaatctcagctacttgggaggctgaggcaggagaatctcttgcacctgggaggcagaggttgcagtgagctgagtttgcaccattgcattccagcctgggcaacaagagcaaaactccatctcaaaaataaataagtaaacaaaataaataataaatggatgggtgattaatgaggcatggctctatgagaatcattatgggaatttaaggggtgaattaaagtaggacatgttgatggtcatcaaaagaacttctttcaggatcaggagatgactggaaccagcaagtggatgtcccagcatgcttgtttgaggtggctatctgggtccccaaaataagtagatatgggagatattggccgggcacagtggctcatgcctgtaatcccagcactttgggaggccaaggcgggtggatcatgaggtcaggagaccgagaccatcctggctaacatggtgaaaccccgtctctactaaaagtacaaaaaattagccaggcgtggtggtgggcacctgtagtcccagctactcaggaggctgaggcaggagaatggcgtgaacccaggaggcggggcttgcagtgagccgagatcgcgccactgcactccagcctgggcgactgagtgagactttgtctccaaaaataaaaataaaaaagatatgggagatatgcagcaatgcagacagagatgggctggccattgatatattcctcttgtaccctctgatgcacaaaattccagaaagagccatcctgtctgccagaaagggagaaagagactgcagatgactatggcatatattccccagaaaaaagtccccccactcccatatatagttggcaaatacactacactgagctactgccactatccccaggaagctataaatggtaattcttggaaatagacgtttacagtggattgggctttgcatacccaatggtagatacaaaagctcaaaataccgtaagatgactggaacagaaggtactgcacccccaccaagttacatgtcttcagaccaaagaatgtactttatagcccatacgccatactttacagccaatatccccagaagtctcaaccagtgcagtatcaagtcaaagtccaaaatctcatttaaatatcatcagctcaaaagtcccaagtgttataacccaaatcaggaatgggtgagactctatgcataatccaccctggggcaaaattcctctaaatctgtggacctctcacactagaaaacaagttatctgcttccaaaatacaatggtagaaaaggcctaggacagatattcccactcagaaagggagaaattggaagaaataaaaacatcactgattccaagcaagttctaaacccagcaagggaaattcgatttcaaggtctgtaactaatcctcagtaatttgtatttctgtcctctaggcccatggtggctccatcaacctctgcctttgcaaccctggtggctccatcaccctgtctctggcctccaattcattcttgcttttttttaaaaaaaaaattataacatgctttcagctgacatccatcaactataccatttcttttacactgacagggtttataacattttcagtctgttctgtaactatacttaagtcttcggtgctttgtctattgataaatcctaaaaactgaacgccaatttggtgtttccaatggtgtaagtaaatgaatattattcatgggacaatcaaatagtatggtcagacctgtaatgaaggaaaggttactctacatcaatagacctgggcttctcaagaaccaatgtttcatgtctcaaccaaatagcctcttttttttttttccatacaggcatacgtcaggttttgttccagaccaccacaacaaaagtattgcaataaaacgagtcacactaactttgtggtgtcccagtgcatataagttatgtttacactgcactatactgtagtctattaagtgtgtaacagcactatgtctaaagaaatgtatataccttaatttaaaaatacttgactgccaaaaaaggctaagggtcatctgagccctcagcaagttgttatctttttgctggcagaaggtcttctcttgacgttgatggctgctgagtgatcagggtggcagttgccaaaggtgagagtgggtgtggcaatttctttcttttttttgagacgaagtcttgctctggcacccaggctggagtgcagtggcacgatcttggtattcaagcaattctcatgcctcagcctcccaagtagctgggattacaggcacctgccatcacacccaactaatttttgtatttttagtagagacaaggtttcaccatattggccaggctggtcttgaacccctgacctcaagcgatctgcctgctttggcctcccaaagtgctgggattacagacatgagccaccatgcccagcgtggcaatttcttaaaatgagaaaacaatgaagtttcccatattgactttctcttccaagaaaggctttctctttcgcatgccatgctgcttatccacagcacaactttcttcacaatcggagtcaatcctttcacaacctgccactgctttatcaactaagtttatgtaattttctaaatcctttgctgttatttcagcaatgttcatggcatcttctcaaagagtagatcctatctcaagaaaccagtttctttgctcatccataagaagcaaatcctcatttgttcatgtttcatcatgggcctgataaaatttagtcctatcttcaggctccactgctaattctagttctcttgctatttctaccacctctgcagttatttcctccactggagtcttgaacccctcaaactcatccatgaagattggaatcaacttcttacacactcctattaatgttgatattctgacctccttccatgaacattcatgaagactgaatgtttttcaaggcatctagaatggtgaatctttcccaaaaggttttcaattaagtttccttggatctatcagcagaggaattactatctatggcagtaattactgtctattacaaaatgtatttcttaaataataagacttgaaagttgaaataatgggctgcagaatggacgttgataatgagctgcagaactgacgctgggttagcaggcatgaaaacaacattcatctccttgtatatctccatcagagcttttgtatatctggtgcattgtcaatgagcagtaatatttaaaaagtaatctttttttctgaggaggtctccacagcgggcctaaaatattcagtaaaacatactgtaagcagatgtgcttgtcatccaagctttgttgctttactgataagagaacaggcagtgtagagttaccataattcttaagggccctaggatttttgaaatggtaaaggagcaatggcttcaacttaaagtcaccaactgcatagccactactgagagagtcaatctgcccttggaagctttagagccaggcaatgacttctcctttctaaggaagtcctaagttcaactacatggaaaatctgtggtttcgtgtagtcatcttcaccaattatttagctagatatctggataacttgctgcagcttctgtgtcagcacttgtggtttcacattgcacttttaggctatagagatggtgtctttccttaaacctcacacgccaacctttcctagcttccaactgttcttctgcagcttccttacttctctcacccttcacagaattgggagaattaaggccttgctctggattaggctttggcttaagggaatgttgcagctggtttgaacttctatcaagaccactcgaactttttccatattagcaatgagtctgttttgcttgcttatcatcaaatacaagggcaccctaataagattatcgaagatttctcatcagaaacattgaaggccagaaggcaattggttgatacattcaaagtgctgaaggaaaaaaactaaagcaagaatccagcaaaactatctttcaaaaaatgagggaggtatcaagacatttctaggtaaacagaaactgagggagttcattagcactggacctgtcatacaagaaaagctatagtgagttatattaaacccttcaggtttaaatataaggacattagacagtcacttaaagtcagatgaagaattaaagatctggtaaagctaaatacacaaaaaaatataaaagctagtattactgtaagtttgtgttgtaataccactttttgctttctacatgattaaagagactcatacattaaaaaattagtagtcttgtttttggacacacaatgcataaagatgcaatttaaagacaccaacaattgaaaggagtaaggacagaattgtaaagaagtggagtttttgagggttattaaagttaaggtggtataaatttaaattacagtactataacttcaggatattaaatataacctatacaaagaaaatagctatagaatatacacaacaggaaatgacaagagaattaaaatgtttcactaaaaaatcaattaaacacaaaagaaggcatttatgtagaaaaggagggacaaaaagcaatgaggcatatagaaaataaatagcaaaaggaccgaagtcagtccttatcacgactcactttaaacataaatggactaaactctccaatcaaaagaaagagattgggaaagtcgattaaacaaacaataagaatgatccaattccatgctgtctccaaaagccacaaactgggtaaaagtgaaagagaaaaaattattacatgaaaatatagcagttccccttattagtggaggatatgttttgagaccctggtatttgcctaaaaccatggatagtaccaaactctataaagtcattccttgatatccatgggggattggtttcaaaatccccctgcagataacaaaatccacaaatgctcacttccctagtatcaaatagcatagtatttgcatataatctatgcacatcttcccatatactttaaatcatctctagattagttatcatatcagatataatgtaaatgttatgtaaatagctgttacaatacattggttttttaatttttaatatttttattcttgtattattatttttgagtattttaaatccacattggttgaatccatggatatggaatacagagagccaactgcatatactgtgtttttttcctacacatactacctaagataaagtttaatttgtaaattaggcacatcctttataaatggatattaaaagtagattaacagctactattaaaagtaaattaacaacaataataaaatagaaaacttataacaatatattgtgatacaagttattgtgatgcatatggtctctctctcaaaatatcttattttactatactcatctatatttaggctgtggttgattgggggtaactcaaaccatgaaaagcaaaactgcagctaaagggggtactgccatagtaaccaaaagagaaaaggggtggctatattaatatcagacaaaatagactttaaatgaaaaggccagaaaacaccaaaaaaagatattattaataaaagttaatacagcaagatataacaataataaacacttacatacctaataacaagaccatcaaaatatatgaggcaaaaattgaaagaactgcagaaagcaatgaccattttacaataatagttggagatttcaataccctacactctcaatgatgaatacaacaaccagaaagaaagaagtaaggcaacggaagacttcgacaactcaataaagcaactaaatctaagacatatacacaaaatgctctattaaatatacacaaaatactctacctaacaacagaatctacagtcttttcaagtgcataggggacgttctccaggatagatcatatgttggattacaaataaagtctcaataaactttaaaagacaaatacaaagtatcttctccaactacaacatgaagttagaatataaagaaaacaagaaaattcccaaatttgtagaaattaaacaacagacacaatcaatgacaaaggaaattagaaatactttgagatgaatgaaaacaaaaatacgacagactaaaatttatgggatgccacaaaaacagtgctaagggagaaatttaaagccataaatgcttatactaaataagagagattgcaaatcaacaatctaactttataacttaaggaactaggaaaaaaataaattaacccaaagcaagcagtaggaaaaaaaaataaagattaaagcaaagacagataaaacaaagaaaagtcaacaaagccaaaagttggttctttgaaaagattaacaaaattgataaacccttagcttaactaagaataaatgtataaggaatgagggaaatagaaaatcaccattagaacacaacagtaataattattatgggcaaaatccactgatatgggtgttaaaattagtacctaaaagtttaagaaaaaataggttatttatatagtcccagagtatttcctctaagatactgattacttatgaatggaaaaaatagcaactttaaagtgaagaaacacagtagacaccactgtagtcaagcaatcaaaattaacatcaccagtaaaaagatatcaaaatcatttcttccctgatatgttgctctgagaagggcacagcaggaaccaaaccccaggtcttgtcacactccaaatcttcatagtgttaatcatcttgctataaatgagcatattttctttcaagaaacgataaatagatttgttgggagaaagcagcaaggcactacttcaatcagaatagtctatcatttgtgaaatatacgtagttctgtacagttactcagaaaagtgtaagtagtgagataagacagtgtctaataggatattccccagtctgatgaacagaaattaaataatgggatacaagtgaggctaatatataaaagaaaaaacagaatggaatagatatttactgatgcttgatacacagtaggtagtaataatacacagtaggtagtaataatagtaataataattatagcaaatatttataacaatagcatattttaatttcatttgatttgtaatttaatttgttaagtttatttaatactgatggcatgtactattatatttatctattcatttaaccctgaaaataaccatatgaggcaggtactactattagccccactctgtagataagaaaataaaggcataaaaagttggatcacttactaagcagcaaaacctacctgacattatactacctcccagaaaatatcagcttaattaataataagtgccagctaggatgctaaataccttacatatcccaatcctcaaaatattcctgtccagaggttttattataccaatttaaatgaaaaaaactaaggctctgattggttgcccaacacactgcaagatattgagcacattcggcttctacctggtaactgtcagaagtacccctcctcctcagttactgtgataagcaaatatgtgccccccataaacatttccaaatgcccctaagagaccagtacttccccaaagtactgctttaaaaagtactggttgttaaagactattaggtgagtagtgaacctaggtgtgtatgattccaaagccaatgttctttccaataggggcattgacttgtaaaggagttgaggtcaaaacaaatgtacaaagacagggaaacaaagtttcacaaagtgtaaggggcaatacactccagatgaggaaactatagtagcaaataactggaagttgaagtagtccataaagtataacagtaatttatgtcatttgttgaattaagtaagacttaaagcatggaccaatttgtaaagtgtatctcctgagggaattgggattttgttcagaactctgagtgagaactgacatcattaacatgttatttatttaaaaaggtctaagctgaataaaggtatgggggtgggaagtaagtcttcctaaaataatttattttaatttcaccattctagtattttcaaatctatttaggatgtttttccattcaatgtt

SEQ ID NO: 473 - DNA, 1467 bp, Homo sapiens
ggacatgtggaactccactccaaaagcggcggcttgcggcggagctctctctagtgaggcggccagctggcgttcgtggcacacttgctgtcggctccgctcatctgttgggaatgcgtcctgtgggcctagtcctccgctggaagaaacgcgctgttctccccaaccaccgtttatcattcttattcaccgtctccggaatgtccattcagtttccgctcctgagagacttagtgactgaggccaggcaaagatttcaccttggggagggggaacgttaaacctttcctccagcagctttcgtgttttaaattgtattcatccgccatggaaagacatcagaagcccaggatctaagagacagactgaaatgaagaaagtagataatattgtgagaataatgaacaagctggtcactgaacagcagaaccgtaatggagtcccagttaaagggttttaactttatttcgtcactttttgcaagcatgatacaaagaaaacaaacacctaactacgctacggtttatagttaaaaggaaggtggaagatcctgagtcattacagcaatcacaaaacatgatggatttcttcatttaaaaacacaaaagaggtcttggcatagttttcaagggcaaagcatgacaagactctccagtgctttctttcatccccctctgtgtgcctttttctgcctgactcacagcctggctcaatcctaatctttctactgcaaagatgcagcatttaaagcaatttttcctgtgcagtatttgtagaatgacagatcctgccagaagctcttggaaacattttggaactatcttgcttttctgtatgttatgatccatctagcaccgttttcctcctgtggtagcaaatgacacttttttcaagcatcagcagcagaaatgagtctaccagatggaataagatactggtaaagggaaagatttgtttctaagactgcacaaatgaatgcacccaaatctgtgagttgattaatctgtgaagaaatacaactggcagtatttacatatctcaatgagtctcaaagtgtggtcgaggaagccctgggggtccttgggaccctttcagaggttccacgagctcaaatctattttcataaccatgctaagtctttatttccttttccactccagaggctatataatgtctgatgacatcatcgctttataggatgagagaatacgtgcttgtatattcttgtgtttgtaagactttccaggtttaatttattaccatatggcaattttcaataagtataacccacaaaacccaacagatttttggggcacctctaacaagggtcctaagaccaaaatgtttgaggactgctaatcgatattattcaattgtctagtcccctaaactccaacccttcttatcaggactacagagagaaaacaggtggtcttcttgacaatcgctttgtatttacattcagtg

SEQ ID NO: 474 - DNA, 40001 bp, Homo sapiens
aaggtaagggagagcatgaggacctaatgcatggggggcttaaaacctaggtgacaggttgacaggtgcagcaaaccaccatggcacatgtatacctatgtaacaaacctgcacgttctgcacatgtatcccagaacttaaagtaaaataaaataaatccatttgctctctaagaatctcatcataccactttgtttagtcatattatttatataatgtaatattttaactgcttttcagaatcagcaagtataactattataaaccttgacatataaaataaatgttacagttgaaaaactggaaagggaatgtgaggaattcaagggaaagatgaggagaaaagctaattttttttttttacaacttataaagtggcaagtttagagacaatgtctgaacactctaaagttaactgttaaacagctataagtttaatcataaaggcaaccaaaaaataaaaggaagaaggtaggatcagtattaaaagttaaatccttctatttttcacaatggggagatattaggttactgaaggttaaagtttagtatattatataaaaaactggcataatgatgagacaattaaaaataggaaaaaaagttctaaaatgattatctctgacaaaggaggtagaaaagatagggagatttttatttttcattttatacctttgtgtgttattcaaatttttatgtttatgcaactattcatctcaaaataagcacatacacattattagaaacacatacacatacacatctcaaaataaacacatacacattattagaaaaatgatggcaaattcttattcatttttttttctatagtccatggactaaatactttctattatggtatttcaaagatataattaattaaacagactaaagaatcatcctaaacctttgataaatatgtggagatagcaacagcttacattgtgttagaactgtcaaaataaatccacaaccatcatctcatttaaccctcaaaaccatcttgtgaaagcagattttagagattagtaaagtaaaactcaaaaaggttcaagtgatttgccatccccctccaaaaaaagtagaataatataaatacgtttaaaaagtaaatcaaaaaagcctttataaagcactgaaatctgaaaatgctttcgtaatttataacaggagaatgacattgaaagaaattacacttgacaatacaaatggtcaggcacatcggaaaacagctgggcagtttgttaaacatatacttcttataaagttaaacacacacttaccatatgacccagcaatatcattcctaagttattacccaagacaaatgaaaacacattacacaaagacatgcactctaatgtccagactctttattcgtactaaccaaaagctagaagcagcccaaatgtccaacaagtgattaacagataaactgtgatatatccagaccatgaactactactcaaccataaaaaaaaagctaatgatatacaagacatggatgaatattaacagtattatgctatgtaaaagaaatcagccataaaaaaactatgtactgcatgattccatttatatgaaattctagaaaagcaaaattatagtaacagcagataaagtggttgccagggttaagggatgaggactgggctgcaagggagaacaaaggaacctctcgggttaatgaaaataaccactatatcgttttcagagtgtttgttacactactgtgtatctctggcaaaactcatcaaattatgactttacattgcttaattttattatgtaagttacgacttaataaggctcatttaaaaaataatccataatcacatttaactatgacaacagcttttcaggataggtatttactacagaccttcaaaaaatattaaaatcaatattaggagggaacttgtaaccataaagtagatatacaggaactaaaaggttctgagaatggaacagtcctcatcctactcgacgtggccatgtgggtaaacagtagttgcctagcaactaatctaaactctaaatttctaataaatatattgaccacataagcaggtgatctcacagatgataaaccgctttacatcgaagggttcttcctttaataataaaaaataataatgtgcttaagttatttatctaaagtaggagtgaacaaggtgtattaaacctagatgatgaaaaataaaaatacgaaattaaacataaacatacacacacaaaaaatccttgtcctcatttggccttttacgtcaggactttacttaccaaatttatgggattaatccatgagtttgcgggtgaaccctttccccttttctactttaagccattcccctacaaccattcaaactggcttaattctcttatttatatatttacatgtgattaaatgcatataggatcgtacttttacatatattaaatgattctaaagatatctctccagattacagaacctgtagacaccacagaaaaatacaacactttctgtaacacgctacacacaacataccagaaagtcaaacctaacttaactagattataaatgctcaaaatcaagaattacaaaaaaatcccttaataacaagcaaattcctaacacacgttaaatatatcatttctctcttactagacatagcatgacacagtttaacagtatcagaaaaaagatcaacttctaagacaccactcactgctagcactcttaccaaccgtattatttttggtttgcggagcacttacccctcttctgaacccaaccttctttcacaatggtaacatcgctcatgatgactcccctctgagcccccaacttggagaaatggtactttgtgatatcagctttagggtttggattctctgctgctgctgcccttcccactctctagtgatgactcagcctggaaggaagtattgaagaaagaattttttttccattcttgcaactcacagagcaataacaaacaactaattctttgtaaatgtcttcaactggcctgacctcacataaaagtctggctcttcaaactggggaacttatttattaaatagttctataatgaaagcacttccctagtcttgtgaccaatttcaaatgatagtgaaacttttaacctaagaggttgcaacaaaaaagtcttaagaaaaccagtcacgcctacccaaataatagagaaaatttgtttggtgatgtgtatttgaggtgaagagggaagagaatgaaagttaattgccctaaatccctgtaatttcagaagcaattgtaaattttttgttttttttttttttgaaacggaatctcactctgtcgccaggctggagtacagtggcgcgatctctgctcactgcaacctccacctcccaggttcaagcgattcttctgcctcagcctcccaagcagctgggactacaggtgtgcgccaccacgccctgctaatttttgtatttttagtagaaacggggtttcaccatattggccaggctggtctcaaactcctgacctcatgatccacccgcctcagcctcccaaagtgctgggattacagaagtgagccaccacaaccagtcgtgaatactttaagtgatataaaatacaacgtaccaagaactcatcatttacgtattcttactctgcctgttccaagaaatattttaaggagattaaaaaataattgatttcatattatgtacttattataaagtaaagtgaaacaaagggaatatgaaagtagaaaaaaatatttagtactcaagatgtgccaagaactgttacgggtacttacatctattattcttatgtgatctttataaccttatgaggatactattaattccatttcacagacaaggaaactgaggctcacacagataaaccaacttgctcaatttcaacacacctagtaaatgtggagccaagatctgaacccaggctgtctgactccagagcctgcattccaaaactatactgccttaagataaaaagaagtcagagtaaaggcatacatacttgggaaagatacgtcacaaatttggcatggagctcttgggaagacaatgcaaataacaaaacacaacaggctttcctatttacagtatccaaaaaaaatttttttttgagatggggtttccccccatcatccaggctagagtagagtggcacaatcatagctcactgcagcctccaatgggggtcaagcaatcctcccacctcagcctcctgaggagctggactacaggcaggcatcaccatgcctagctaatttttaaaaaaaatttttgtggagatggggtcccgctatattgtccacgctgcacaaatttttttaaaaagcaaaaaaagttcctcagaagaaatacaacttttcctgggacaaacatcgaatttatcccatgggtcttcttcataagatgtatgcgggaaagtcctcaaaaacaccctcccatatacagcaatgagttttacagggtcattgcttattgtcactctcaaactaaaaaggaaaatgccaacataaaattagtaaatccatttgcacagaaggggaccaaaaaatgtggtccaggtacaccagtgttatgtggtcaagaatcatatcataaattttagataactagaaaaatggatagatggactacacaaacatactctctcaacttggtttgtgataaatgatacatagcagttaagttcagtgttagactcccaacctagcgctaaattagactacaggtcattcttcaatgcaaattaagtgtggagcttaaccatttaacagtcaggaatcaagactaaacattctctagacagcctgactaaatagcctgacaaaagctatgtagctgaatgcaagaccaccagcctcatgtattatgaggtcacaggcagaacctataggtaaggctgagactcctcaaaatcaccatgagtctgttgctgtagagtgtcaaaaagggatattagtttgtaatcccagcactttgggaggccagggcaggaggatcacttatgtccaggagttcaaggccagcctgggcaacatggcaaaacccatctccacaaaaaatacaaaaattagctgggagtggtggcaggcacctgtagtcccagctactcaggaggctgaggtgggaggatcacctgagcccaggaagtctaggctatgctgagtggtgaccgtgcctgggtgctacagtgagaacctgtctcaaaaaaaaaaaaaaagaaaagaaaagaaaaagaatttggttgcacagttggccatatttttgtaatatgcatgtaaaatcattttaaaatctgtcttgggagcctcatcataaatttttaaaaatccatacatacatataaaatgcaattgatatatggtccattaaataccaagaatcagcttgacagaatttacccccagattaaactgagctacccaataggtatggaatcctctaacaaggttcatcacaatggtgtattaggaagagcaccagaaagaccaagaaacttgagtccctgccccacccagagtgatgctgtataaggtcactttaattatctgtgcctcagtttccggagccataaaaatgaaagtatagcattagatgaactctgaatagctttatagctcttccagagctaatatttatgattctgcaagttaaaatctacggagtatctacttcatatatagatggcatcataagtgaaagacatgattatacatacatagttcatgtcctcaaaagtttgataattggaagataaaacattcaaacagcatttcaactaagacaaaatttgggctaagctccattattggaaaaatactgtcctccttcccctcccatcccctagtcccccaaatacagtcagaagctttctaatatagattccaatatacatgtaaaatcctcctaaaatctgtcttgggaatctccctaattataaatttttttaaatccatccatatatatataggaattatctaatatagggaagaaaaattatcatttgcaattctagtgttttcttctagtaaatctttttactttcctctcataatatttagaaatgagaaatacctgtagttggtgatagagtactgaaaagaaacagaactaaaaaacacatcaacaagtcaagaagcatatattaattttatctacccattagtattcaaagattacttggcagagaaaatgagtttacatctaatttgattaaagactatgatgctataataaaatctgtaaacatttgagttatttaatttggcattttaaacaaatgaaaggtgatgttaatgggccagtcaatacacttttattaacttgatgctatggaaattattgtaccaaattttgcaaatttagaattatcactgttaactgtaataataggtacaaacaagaaaaacactagaagtgttgcagaattaggaaagtttaaataaaaggtatttttagaatgccacaataagtttttcttatgtgaaaatcactttcaaaagtgtagcaggggttgtttgaaagattaaatgaatacaggtaaagcacatagaacagtgcctggcacatggcaactgcttaccaggcattggttagcattaactctaaactgaatctaatcctatcccatgtaaaagatcaggacaaagtatttgttgtcggaagattcaggactatctttccaaaagaaggtatgctgtgtgaccaggatttaaaatactgatgcacatgctgaaacctggagtaacacaaatcttctaacaaaaattaattgtattattaatgcatattaacttaaaaataaaaatgccagtcagatcacaagactgatttgctcaaaatgaaaatggtttttcagttcttgcattttgttgctcaaatctaagatagttttaaatttttctttttaacacttcaaaacttaatcacactataaagacaagctcctatcaaatcatgctaagcatccaactaacaagttgttaacagtgattgccttaccttcccaaggacaaattcttgaactaaaagatataataacaaaagaaaacatagctatcttttcacgaaaatacacaaagtttaagtaaaggctaaacttctacaaaatcaatttgtaaaacaggttcctcattttaaagaaacccagatagctggaaatttccactgaatttttatgagaaaatttctgatgtttacatcaaaagctacagcttaaaaaataagtccttactttccacaagtctctatgctaagtccatttgttccctagtaagtttaatcaacacgtttatttagatttgcagtgattctgaaaacagattccttctgacagtgattttctgaatgaaatgtaaatattaaaagtttttaattaaaccagcacacagttcacactccagtatttgttaaatataatcttatttaaaatattttacagctatgaaattaatttttaaaaagtccaaagcaaaaccttaaagtactctgacatatacaatttagagtcgatgtcaagattattaagccaaaaattaattttaaattggaaaacaattcactccagtaataattatggaaagaaaaccaaatgaatacaaataataatttcacaatttttgcaggattactttggactatttttaaaacgctgtaagaaaacatgctgcaaaaccacaatgcaaatacacaactgaaaactaaaaccctacattcatctaaatttcaacagtctcattcatgtaatatttgtcctccctcactttaaaactggaacctcaagccaatcaaagatattggggtcaaccctagtaaggaaaacaaaaagatcttcaagtaccatctccctgtaaactttcaagtactatctccttggtaaactttccaagtcaagataatgtactggcaaaaggaaaacaattacagtccggatatatatcttgcatataattgtgcattaagtcataaaccttggaaaactagtaacttagtaataagttgctattttaattataaaatattttcatgttttagacaaccacccccggaatgtttgtattcgtttatacatattttgcaagtgatactcaagttctgaagactaatcttcatttcctacaccatctttattagactcttccaccttcgttttcctaagtaaatacataacctaaaccaatgagtttcactcatttgtcagcttcaaccactgacaaaacccagtggttgcctagtgatgtatagttctactaaaagacatatatgaccatgctttaccaaatacggaacacatgtctaaactgttgagacaactgccaatgtattaactacaaaaagccattattttttactttagcctcaactaaaatcaaagtgtgaacactttattatggctagaaattacccaatatagatgcataggtttcactgttgactttctatttggaaacttcatcaattgcaaactaccaggctttcaaccaaaatgccacattggtgaaatgagttggttttattttcataacaacattattttgatggaagaaatgtgagcatcccagctttgacttgtgggtaagcatttcctctgctttcagaacataaacagtaaataccggtattggaaaaacctggccccaacgagattctttatctctaggctaactgtagattcccgggaaatcccaaacaagggatggtgaccccgcctcggcgtcagggtcaacacagcaaccagctaggcttcaactttgggctctgaagggccccaccggcatcatggctgatgcggaccgatgcgccggaggaggtggacaaggaagaggctggtctgtttacttgcagccagagctgccgccgccgccagcagcgacagcatcactggatcagccaaacccagcatcttccgcacatttctattcttagcacacaactcccaagcggatcaaaaccccactactattaaaaacacagacaagcacgttacccacctcccacacacacacccccccccccaccccaccagtgccgtcttttcctgcgcgccagtggcggggaagggtgggggaaggaaggagaccccggggacgcctgtgcatcctcgccttcaccccaccccacgcgcagacagcctcagcgccagggcgcgcggcagacggctccctccccccaacccaaacacactgacaccggcgctccacgcgttatataacctcgccgccgcccccggtccaggcgggcgccccctccccacgccgcgcggcccgggcggggaggggcgaggggaaggagcgagagttgcgcagacagcaggcgccgggccggggcagcccagacacagacggtaccgctaggccgggaacacccctcccccggcccgctgcgcaccgccgccccccagctttccccggaaagcggggggtgtcggtgtcaaccgcgctgggcatcccccggcctccacacccacacccgaagcctccggtgacccagcccccgcccacgcccccggcgcggtgacaacccagaagcccccgcctcaccccaccccgccgccatcccccgcctgagggaggcagggagggcggaccggggcccggggcccggagggagtggaggccaggcggggagggggctagagttgggggcggtggctgttacctgcaacggcggcggcggcggtggcggccccgcagctgctcgggcggcggcggaggatggagccgggggggggcggggggaggagagggggcgactcgggggtcccccctccctcctcctcccctcctgtcctccccccaccccacagagcctctggcctcctggagcccggtgcggccggcgggagggcaagcgaagggctgcaggggagggagggagggagccggccgggccgggccgcggagctggagcgggaggcggcggcggcggcggcggcggcgggagggggagggaggagagagggcggcggcggggagaggaggaggcggagactctacatgggaatcggatatcggctacaaattcatcaccagaaaacaccgctcgggcgggggccgggtcacgccggcggggcggcggctctgggccccggggcgcgcccggcgcggggaggggttctgcggcctcctcccgggctgcgcctcgctgaggggaccccccgccgcctccccgccccctccttcctcccgctcggggccgccgccgatcggttctcgccgtcgccgcggggcttgttgttgactttgaggaaaactcctgacgtcaggggctggctctcggcgactggcgggagcggcttccccgcgtccccggccctgcccgccgcctctgctcccctccctgcccggccctcgtcctcaggcttccccgcgcccccaaaccagcggtgccccgcgccccctctcctctcgcgagaacatccccctagccagccagagccgggagcgggggcagtcgctcccgggcgggaagttctgggtttccccctcgcccgcgtggcccttggcgggcacccgaggcccgggagcggaggctcctcgcccagccgcttcctcggcgcatccgcccacccgccctggccgcggacgcgcgcgccgccaggccccgggcgtctcctccagtccgccgcggccccttggggagatgggcccggcgcgagggctcgcacctggaagcccacgaagtgggcggtgcccaatgaggtagggaccggagagcgcggagcagtccagaagccgaccccaccccctgcacctcggggaagagggaacccgggtcagcccgtagcaagaatcattcctgactatcccaggagaccacggcagaccaaaaacacctctctgaacagccttccgcaccgctcgctgcaagcattcgtccacacacggtacacagattgcgggcggatcgtaattcactcttgaaatcacaccctttttagggatattcgttttcaatgactttgggaaagccacgaggtactacatttactacgaagagaccgtttctttattttgaagtcagtgactcctgagactgcattggggacaacttttttgcacaatgaccatattttaccatgcagcgcacttcagaaaattataaaagtttacaagttttatcgcttctggaaacacctgggcagcatccctattatcccgccacgtggctctagccttgttgatgtacctgttactttctcccactgcaacatttttgttaatgtctgtggcttctttctgcagaagagttcctcctcctgacatgcacttcattctctgcttttctatgtcttgacaactctcttatggtagtcattttcttatactgtagccccctggtatttatgtactgtgtggtattaatatttatacttccaggttcacatcttttatgaactgtgcatctgttgggattgtggacaggagtaggaaaccaaataaaagggttttttaaaaaagtcagttttctccgtttgtaagggaaacttgtctccctgaccaccctggagcaaaatttgccattttaagataacacagtccgtctgagagaaagtcctgcaccatgcctttccccttttcccatatttcccagcatgctatgagctgatgaataaacagactttgtcctattttcgttgtatctataaaatatacataatgtattcccataattatcagacctctcacagtcactattggtaaaattattgggttacaggtttcttgctgtaaaacacaaaaataggtcatatttttattccatagtaccccaacttgctttttatttttaagaaaatagtcccttatgacaccagcactaaaaagagtgtctgaaactttaaatacttaacttttgagagtcagagtatccggaattactgaattactagatatctcttatcagtgagatgttcatttgttcccaaatttaacatcaatatatttacaagaactgaatgtgtcttatgagccatactacctcaaaatatttctcccagtctggtcagattgcattaaatcttaggtggattaaaccctaaaattcagtatgtgagaatggattatatactctcggcttcatgtatttgaagaattataagtttttatttctgttcaatttttgcttgtggactatagtagtttcataagtttccataataaaagcatgtttgattttgttattgaattactattgattagggatattatttatttaaataacgttgttctttctcttagactatgccggtatgaatttggtagaatctgccgattgtggtatgtcggtactccatacagagtgtgtggcagatttcttctctattttgttatcacatccagtaatatggagtgcagccagcatgttcatccctgggaatgtccctcctaaattttgcaaagaaagccttcattctttattacaccaaatattcttaagattaacatttctcagtattagttatttattcattttaagaaaaatgttcattcttctttactaccaatgactaagtttgatactgagctatttcttggtacttcccccatttcttgggagtaactaaaactggaaggatatttagaatttcagagcatctaatgtcttagtccattcaggctgctataacaaaataccatcaactaggtagcttataaagaacagaaatttatttctaacagttctggaggctgggaagtccaagatcatggcaccagcagatttggtgtctaaagagggttccgtttcctggtttgtaggtggtgacttcttgctgtgtcttcacattttagaaagagtgagggaactctcttggacctctttttctttttctttgtttttttttttttttttttttttttttttttttttttttttagagacagtgtctcattctgtcacccagactggagtgcagtggcatgatcatagctcactgtagcctggaactcctaggctcaggcaaccctcctgcctcagcctcctgagtagctgagactaccagcatgagttaatgttcccagccatcttgagcctcttttataagggcactaatcccattcttgagggctcaaaccctcatgacttaatcacctcccaaaggccccatctactaacacactttggaagttaggatttcaatctatgaatttggggaaacacaaaaattcagaccagggcatcacataacaaaaattaagttactgctcttctgtcttaatagaaagggtgtgtcatcctaggagagggcatggaacaaagcagacacagaatacctgtttgtggaagaaatacatgttctaatgttctaatgacggctctaataaatctgtgtactatgtacagtttatatagtattttcctcttgggatgtaacgtgatttattggaaagaacataaaagtgctttggagacttgcagaccagagttcaaatcctctctctgcagagtttgtctcatctcaggcaagttacttaatttttctaagccttatatttccttatttgtgaaatggcagttacaactacttcaacaacttatgtgaattaaattttatgaaatattagtatctaaaacacagtgagtggtcagcaagctaagattcctttaccataaatgtgaatatatttatgttaaactaacaatagctgctacaaacaaatacaaaaatctatattggcactctctgccacagttggttctgaaataaccacgttaagtctacagctgtaattagtgaatatattctagatgattaatagaacaatttctaaaggagtatagcttaaatttctgttggttaagcctcccaatctgtgatatttttcttacagcatcccaaactgactaaggcacacagttcattacaatagttatcagtactaattgtctttttctccctttccctgatgtctgtctgtctgtctgtctgtttttctgtttttttttttttttttagacagagtctggctctgtcaccaggctggagtgcagtggcatgatctcggctcactgcaactccacctctcgggttcaagtgattctcctgcttcagcctcccgagtagctgggattacaggcgcctgccaccacgcccagctaatttttgtatttttagtagagatggggtttccccatgttggccaggatggtctcgatctcctgacctcgtgatccgcccacctcagcctcccaaagtcctgatgtctttcttaaggcacaggccaggtgcctgtacaagaacatatgagcatagccaagggccagatatatcactaatctggtgctgtgtgaatctgggttacttaaagccctgtggaaacctccctcttattttgttctcaggttttatttttttgctatgttattagagtatgaatgaattttttttgttcatattctcattgtcagacggctaaatctgttagcaacttaagcaatctctggacattacatttaatatttcaggacacttgggtcacaaaaagttactgaccactaataaataactgcttgtggagcatcgagctagaattcatgttctaattccaaagcaacaagcatacacaattattattcctggctgtgcaggagaatcgtggtatgtgataaattaatacatattataatcctacagcctcattttagtatgtaatgttaacttcctgaggtggtgtgcatttctagttgtttctgaatcagctctgtggggattggactttcccatgcaacagctagcagtgaaataacaacagtaaatttccaaccttcacctggataattacctcaacttcttcctcggttatctcatgtaaatactgtcctgttccagaaagtttccccatccattttaaaacacagtttcttctgccaatcaaaacactttcacaattaactgaaaagtttcaaatctacatctcactattttaaccctctatgaagtccttcaattgttgattctgtgctattttgttaaataatactggctttttatagtaggagaaaatcagtctcagaatttttctgttgactagacagaactatgaccattttaaattgcaaacactatctcgattcagtaattggatttgaatcaaagctctgaatttgatttagaattcaaactttgtagtggggaaagcaggcaggctcagcttctctatttctctatcttattttcctcttccactccacaagtcagtctctgggtgaaggacaaaacagttcttacccagctggtaccgctgtcagccagctttgcactctctcagcctagcacacagaaccagctacatgatttgcaaggcccagtgcataatgaaaatgctgggccccttgctggagaagagttaagaatttaaaactttttgagagcagagcgttaagccaagtacacaagcctgtattccgtacaggtagcatgcccatgaggctgccggcatgtgcttcatgctagctgtccaggggcttttcggagagttgcttctgggctaccctaactgcaatctctgcgatgtgggtaatgcacccttaccttcagctggcgctcctgatggcccctcagctttagtttcttcagtcctattggagtcttctcacccctctgggagaaagtctcataggcgcaactccagatggctccaggcaagttctctccctcccataggactctgggctacagaaaacattgaaacattctttgcccagcaggccattctcttccaagcagttgggcagcctgtttcccagttttctgaatgggagtcagatcccagtccacaaaatgcccctgccctgcatccaacccccattgcaggaaacacattccaagctctccacacaatcaatggaaacccgtggaagtccccggcatgagccgaagaaacatcctccattttctctgcacaggaggtgatgagtgcaagtctcccttccacaaacctatcttgaattttctccactattgtatatgttttaagtggatgagagtatttgagtcatagatttggttttgaattctttccttcataatagtgaccaagcttgaaatttcatacttttgtatcttgagatctcagttgaaacttcaatttaaaattcctattaaaaagcatattctcttgcctcattcaaaatgcagtggctcatgcctgtaatcccagcattttgggaggccaaggcaggagaatcacttgagctcaggagttcaagactagcctgggcaacatagcaaaaccttatctctactaaagttattttttttaattatccaggcatggtggttcacgcctgtagtcccagctattggtggttgaaggggttaaggtgagaggataacttgagcccgggtggttgaggctgcagtgagctatgattgcaccactgcactgcagcctgggtgacagagcacgtctctatctcaaaaaaagacaaaaaaatcttctctatgctgtaactattttctctgttgcttatttagatgtgtgctcacatgtattaaaaaattatcagctattactgaataagatatttaacaggtgttcaaggcacaaaattaattaaaatagtgtcttctctacatatttgtatttctgtttgataaatatgttccaacaaattgcctttttcatacattattacctacgttactattaaatatttttagagactcttgcccttagctaatttctcaaattttttattaagcaatttaaagttgaaccctttgaaattttatctcagaagatgctatgatatagatgccacaaaatcaagtataaaaaaggataaatgtacaatttgtatgagagtcggtcacttgcacaaaggtcatgctgagctatgaaaacctctagatgcaggcatgaatcataaatgatggatttttgcatactttttttttgagatggagtcttgctctgttgcctaggctggagtggagtggcacattcttggctcactgcaccctccgcctcccaggttcaagtgattctcctgcctcagcctcccgagtagctgggactacaggtgtgtgccaccatgcctggctaattttttttgtacttttagtagagggaggttttgccatgttggccaggctggtctcgaactcctgacctcaggtgatccgcccgccttggcctcccaaagtgctgggattacaggcatgagccatcacacctggccagatttttaaaaataatgtaagactgccttgatttccctttaatgtctatgattaccaaagagagggtttgccttcctttgttctttatcaaggtattaaaaattgagaaaatattggactttggggcgtagtttaaactccttaactttttcttgcttcattcaaagtgctattgggatctttgagtatacaatgttcagagaataacaatttgataaatacgcatgtcatgtttgcctaccttgtctctttctacccctcatcttctgaaaagttacttccttatagctgtcttcttcttccaaatatctgagaaagtctttgagttatgtgacatctagaaatcgtatttatgagcagaagcttcttcaaataatccataagggaaaacttatgaagagtgaggaaaaagactccaattttcattactcttcatgcactctctccttaatggtggttatgataaccctgtttttcttaaatctccactcagggtatcataaaacttatttgcatatttacctagtcccattgtcttccctgataaaatgctttaagccttagatcatacagtttgtattttggcattcacttcaacttaattccataaacatttcttgactctctctatagataaaggtctagagatcgatttaagttcaacacagagtctccttccaagaagctccagctaccagggagaccaacatgaataagtgactataaaacaaataagtgctatgagagaaatatgtataaaagggtatgagaacacaccattgggagcaattaatagtgaaatgagagggagtaagtcaggtcaacctaaagacaggttattgatattttagctgagcattaaaatgaggtccaaagttgatcaggcagagggaggaggacattcctgcagtgaaaagagcaccccaaaaaacacaagagaataacactggggactccaagaaaataaaataggtgggggaaggtctcagtgacataagtgatacgataattcaagtccagtttgagctgtctatatgaatgcaggagcagtggagagggagaaggaagactcttaaataacttatgatatagaatcaacaggaatgagtgatcagttggcgggcagaggggtagtaaatagaagaaggagtgaaggatgatgcccagaattctcccctccctggcactgggaggaggaatggactgtgtgtgtatggacaaacatgcacacactatggttattgttgctaattttggagaataaggttggcaagaggccgggttatgaagagaaaagaagatgagtcgttttggacatgttaaaatgcaaatgcacctgtgagacttccaggtagatagagcaatccacactatagctaacacggttgagttcttactttgtgcaaagtgctccactgagcgctctactgatttaatatcagaagcacttttgaatatggaaatggagggatctgactaaaagacttggtctggatgtaggcttgcatcagagcgtggggtaagtggctccgaatagcaatgtgatataagaaccaaaccttaggaagcactaacactggagggcaaaaggagatggaggaaaaaaagtcaaataggtgggaagagaaaacgagttatgaaagccaaggtgggacagaatgtcaagaaaaggcagcgtttggcagtgggaatgttgcacagaggtgaaataaaagatcaagtctgataattgcctacagaattttacaattgggaagtcattgcttaccttggttgaagtaatttcatggtgtaatgggattgaaagcttcgttgaactgcctttaaattgaggaagagggaaacaaggagagatgaggggagaaactgatatttattgaaacctgctgggagccaagttctgtgccggcactttgcttacatctagctgcacgttacagtagtccgggatattaactgttgttccctagtttctgactccccatggtccttactggctgtcgagtgaactagaagatccttgcctcaggaagcagatgacagagcagagaaatgacgaaaggacctttcctggctttgtagtttcagaagcctagccctcagtgggaaatagaaatgactctggggcttaaaacagtagatgagggagaagatgtgatgctgtaagaacaaggtttcatgcacatcaccaccaccaccaccactagaaagaatgtcagtctagcaggaggaagagaggttggttctattacctgccccatggggacagcacaagaaagaggatgagtgaacaacctgacaggcttcaggattcccaaagaagagggaagttgtgcttcctttccttaagggagcctagatggaaggaaggaccagatgtagatatgtcctgatggtgaatgaaggcaggcccctcggggcatcctggggcccagtgtaacctgggcagcaacacagtaatcccagtgtgatcaggatttctgagtttgcacaggatttaggacgatttctgcgattccatgccctacaatggtgcaggatcagcatcatggttccagcacaccagcaaatggaaatgaggggagagaggaacagatcagaagtaactttgaggacaaacaatcaaggggcaatcaagatgaccaatatctcagaggacaacagtatgaacagacaaccaagacaagtagcccttctctgtccagacaaattgctcccatgcaagtcactctccccactgccttccctccagagcatcatcacaatcccaggcagataggaactttccaaccacgcagcaaaatggaggcccaaaatagaaatggagttgagttctagaaataatgttacatttcctacacacctgaatttgggaaatgaatgatagccagaaagggatccaaggtgatgaaacttctttttttaaaaaaaattaagaatgaagagccgggcatggtgttgcagctactcgggaggctgaggtgagaggatcctttgagaccataagtttgaggccagcctgggcaatacagtgagaccccatctctttaaaaattttttaaacaatttttaaaaaagaatgagagaaactagataatataaatgggggaaaagaaagaactagttgagagggagagcttgaaaatgaaggaaaaataggtcacatactaaggaatgattctgaaggatatgggaggaaaatcaacagaaagggatacaccttgaagggagggtgtacacctctggaacacgagtgaatgtgaaaaggatgtgcgtagatagagttctgtagagggctgggagaaatgtgacaggtttcatgcttcatggcatggaggaggaagggccacgtggtaatgcttgttggatgcctgttggaaataatgtaggatgaagacagaaccataacacagtttacttccttgagcgttaggtggtatatgtattgcattcgacttccttcattgaagttgtggatgctgcagtcactgccgggatccgcagccccctcctttcaggatggaagcagccacttcaccagctgctggaactgttggccactgacacttaagccccttttctaggaattgccatctactgagagagccactctaccgcaaattacacccccttctcagtgaccatacggtctgaaggtggaaagtccagcccccttgcctcagttcaggaggagtccgctggcctataaagatgggcacactgggcgtgtctctcccatccccacagcccctaccaggagatcagctggggtctttgttgtgactgcacagcactttccccctgcccaatcctgcctccttcaccccggacagtcattgattgtgagagcacaccccacaaacttcctgcagtgctgtctccatcccagagtctgtctcactgggaatccaacttgagaaaacacatcaaccttatgacagcacaggtccctcggaatcaccgtcagtactgtaggaaggaactccagcatgccttgggaaaatccaagtttaaagaacgaatagctgtgtggtgggacaacctcctttctttctgccctcttgtttccatgtggatgaaagttacattcctagcctgtgtcatccctgactcccgcctcaccagagacttatctgatggaggagtccgggggaaagtactgggcacttagcccattctggggtcccctgtttggaagacgggttggcccaaatgctccctcataccaaaagaggcctgtcctgtgggtgtggcatgtactgttctggttctaggggaaagtgtttgcaagcccatttgtctgtgggcctaatacacatcctccaatccagcttttactaatgtcaagctgctattttctttgccagtgtccattcttttttgtattgtatttctcaattgggatccagatttacaagggggagaaagggttagctatttaattctccgaaacctttactatatagtacttttggaagggagggaaaactgtttagtgtttgggtgtctctttaggataagaaatagcaagtcaagagtgacaaggaatgcaaaaagaaacatcacacggacagaagataaagaaaaatacagtcgttccaacatttagaaaatatctctgaactctagtcctgtatgcaggtaattcctgcctgagaaggagtggatcacaaatctacccagacccccagccattggatttaaatcattgttcctttattctccaaatgtttggctttgttcgaaagattcataaaaaaaaccaagcgtattggctctgttacacagaaaaactgcatcagctttttgctaaaatcagttttatcatgaagttaattacattttattaccaaaagataagtatgctaaatgaatccatatatcacaacatctcttataggtttgtagaagtgatggtagggatggcactatttttattatgtctatttttaaattaccttaatttgacctcattttaccccaaattactccttgagatgattttgcaggctgagctgagtcccaagttaaggatggcactgaaatttttctgtagcaagaagttaggtatgatttggtttgttttgagaataaacaagattaagaaaaatttacattttagaccagtcgagtactttaggtgtcatcttttacagatttcacatttaatataattctactcctgacattaaattttattactctacaaactagccagaagtaataaggttctaagagctataaaacacgtatttggcttttctcagctgtttgaggcaatggtagaatttctgaggtacccttaagtgttaatgaaatgaattcgtaaatcatttgttgcttgtcagtcatattgcttatcaataatgctattatcaatttcctctaaagcatgtagatttcatacaaaaatggaagctacgtaactacaatttttcaccttttataataacattgtggggtgcaggaagtggaggcacagaggggccttcaacttctccaacctactgtaacattctctggcatgtctgggatgagggatgtatgagataacaggagggctctgctctcagaggtgatgatgggtttgtgctgagctatcgacactcatacctgggcctcttgtgatcaatgacactcaatttggagacggctgactggggttaatggtgcaatctgtggctttggaacagagttcttctctatgtgaaactaattggcccatatggggattaaactggtaacagtgtcctcatttgtcaacccatctattcagcttttgaatctagtcgtgtttgaggaccgccccaaattcaatcaatgtgttttcaaattgtaacatcatgactttagaaagaggaagaggtaaatttttaaatatatcaacccaaatcactgtaagaaaaacttacaatggtctccattgtaagttaaataacaattattcgattgccaattattcttaaatgattatccctgtgccatgggaaacaacaggaagcaagtctgtttcccattagataccttattccagaattacttttaaaattttcaaaacatgccttcagactcccacccctgactgcccaatgactgtttcaagggttgccacctgcagctacccccaactcttttccaaaacatcagattttaagatggaactcggttttccctcacttgatcttcctttgtttctacattcaccagaagcctttcttaaatcctgatgccggagcgctttttaaatccatttaccaattacatgattcatgtcctgactttgaaataaaaaaaacacaccactatttgccacatccttcaattcagacttaaaggacatatctcgacaatacaacatactcaaattcaaaaattctttttagatccatttacattttctccccatttatttcataattaacctgatgcttttctccaattcacccgatacttaatatctaactaatgcatgtaaaaacaagccccaaattgtgagttaagtgtgctgtggtagagactacaacatggtggaaatgaaataggaaccctagaaaggctggataatgatgcaccaggtgacaacatttatatccaatagaaaagcatcttcattacctaactctccagttagaagctatttttccttccaaaaagactttcaaaagaagtaatctttgagcagtcacagaaacacggagcatttctcacaaataataataaagaaccaaacatgaggaagtggcagagaagcatagaccaataaaaaagtgtgagatactagaagagcatcagcagaactttgacaaaaagagaagagttacacagactggactccaaacagagattatatttcagccctattggctaagagttttctttttttttaattttcaattttttttagagacagcgtctggctctgttgcccaggctggagtgccgtggcatgatcatagttcactgcagcctcaaactcctgagctcaggtgatcctcccacctcagcctcctgagtagcttggactacaggtgtgcaccaccaccctcagctaattatgtttaagaggacgcccagacatctagtgagcattctttctggatgtgtctgtaaaggggtttctggaagagattagcatgtcaatcagtagactgagtaaagcacataccctccccgggtgtggctgatcatagtccctaccatagagggcctgaataaaacaagaagtggaggaagggaggaatctctcactctgcctgatgagctggaactgcccttggtgctccaggttcccaggccttcagactaggactagaatctacaggggtgtccaatcttctgacttccctgggccacactggaagaagaattgtcttgggtcacacagacataaaatacgctaacactaatcatagctgatgagctagaaaaaaaaaagaaaagaaaaaaatctcataatgctttaagaaagtttacgaatttgtgttcagatgccttcaaagccatcctgggccgcattccaccctcaggccgcgggttggacaaggttgatctacaccattggctctctgttctcaggtcttcaaactgtaccgctggcattcctccgtcttcagcttgcagaaggcaaatcatggggtatctcagcctccataatcatgtgttagtaacttagaaaagaatgcttttgttagagtgtgcaacatattgtgtttgaatgagagagaactaatgagtgaaataatgtacccacatgactttctttttagttctgtattattttttaaaaattatgggatgtaatatttatgtagaaagtatataaaatgtgtatgtagattggcaatcatctttttgttgttgttgttttttgtttgtttttgtttttgagatggagtctcgctctttcgccaggctggagtgcagtggcgcgatctcggctcactgcaagctccgcccccccaggttcaagtgattcccctggattcccctgcctcggcctcccaagtaactgggactacaagtgcgcaccagcaagcccggctagtttttttgttttgttttgttttgttttttctgagacagagtcttgctctgtctcccaggctggagtgcagtggtgtgatctcagctcactgcaagctccgcctcccgggttcacgccattctcctgcctcagcctcccgagtagctggaactacaggcgcccgccaccatgcccggctaattttttgtattttggtagagacggggtttcaccgtgttagccttgatggtctcgatttcctgaccgcttgatctgcccgcctgggcctcccaacgtgctgggattacaggcatgaaccaccgcgcccggccagttttttttttttttttttttttttttttttttttttagtagagacagggtttcaccatgttggccaggatggtctcgatctcctgacctcgtgatctgcccaatccaatcattttaaagcaaacgcctatgtaactattaataccacccaggtccagaaagcagcgtaagcagaactccaggatgcactgtgctcttccccaatcatagcccctctcccctcaagagtaaccactacccactcccccatctttgggataatcatttctttggttctcatcatggtgtttcctctgatgtatcagttaatatgtaagtttattttttatttcctccttgttctcaataatatgtatttaagtttcatctatgttgtgagtggctgtattttttcattttactgctatgtgatattttgttgaatgaatatatcgtgattattttaggaatttatttcatttaaactcaaatttattgacaaagattttataatacttccttattttctttttaatgtctaagaatctgtaatatcctctttttcattcctgatattggttattaatgcactctctttctccttctctttctcctggttgattctcaccagaggtttgtcaattttaccagtgttttaaaaaatgcaaatgtggggttagttgactatctttattttatacttgttttgtaattcattaattgctgctgtctttattattgtcttctactttcttttattttgctgttctttttctaacttcttgagatagatgaatagcttattcactttcagcctttcttctcaaacaatcctccagccttggcctcccaaagtgctgggattacaagtgtaagctaccgtgcctgccttctttttcaatatatggatgtacatctatacatttttctctaataacgtatttagtgatgtcttatatgtttgagatgtcatattttaattaccttttagttcaaaaaaatttttgtgttatgatttctccttagaattttatttctcaattctccaaaatatgagaatatactttgcacaatttcaatcctaaaatttattgaggcttgctttgtgtcccagtcccagctttttgtaaatttttgtaaatattctacgtgtgtgcttgaaaagaatatgtattctgcagctgttgggtgttgtgttctatatatgttcattataaaatttttaaaaaattataagcatattgttaaaattttttatatctttactgatcttttttggtctccataatctatcaattactgagagaggaatgttaaaatctctctactctgatgtgaatttgtctatttttcttgacattttgtcagttttttatttatgtattttaaggcaatgttattagaaacatacaaatttagaattcttatggcttcctgatgaattgaaccttttattattatgaagcgaccctctttaataatgcttttgaccatagtatctatttcatctcatgttgaaaactatacacacacatatacacacacgcgcacacacacacacacacagtcatgtgccacataataacattttggtcaataatggaccacagatatgacagtcatcccataagagtataatactgtatttttactataccttttctatgtttagatacacaaacacttaccattatgttatacctaccagtaagcctatggtattcagcacagtaacatgctgtacaggtttgcagcatagcagcaataggtgtgtagtaggcctaggtatatagtaggccataccatctaggtttgtgtaagtacattctgtgatgtttgcacaatgacaaaattgcctaatgaaagatttctcaaaatacatccctgtcattaaacaatgcatgagtgtatgtgttcctgtgtgtttgtgtgtgcacacgtgtgtgtgtgtgcataaaaagagacaacagacagagcacaacagagctatacacacatatggttataagtatatatatatatacacacatatatacatatatgtatatacatgtaatacacatatatacatataggtatatacatgtaatacacatatatacatataggtatatacatgtaatacacatatatacatataggtatatacatgtaatatacatatatatctgagtgtgtgtgtatgtatgtgtgactatgtcagcttttatttggttagtatttacatagagcacccttttttgtccttttattttaaacctttttatatacttatgctttgtatggatttttaaagtgaagtctgaaatttttgtcttttaaccagaggatttagttcatttacatttaatataacaattgacaaaactgtgtttttaaaaaatcactatcctatttgagattttctgttaattctgcctccttttcctctccttttaaaagagttggtcctaattttcaccttcactttctgtagcttaacaagcagctcatttggaagaaactagctcaataaaagcacataaagtttctggaaaatactattagctgagttccagaaccccctaacctaagatcattttcttgaccaggaaatcttgactgttagagggcctcattggtgacccctgcctccttccatgtcccttatgaatacatagaatcgcagaggacaggatccttccgctggagctctgctcctcaggcgtgcctccctgtgtgatactgacaagtgagagcctgggtggtatttgcagctgctctctgccttcaagtttccctaatacacctgacttcgcatttgtgtcctggcctgttagtggtacatgtgtatgacccttagcctgacactgttcttacctttcttttgactgatttcttcttgtcattttctttcctctatgaatttggcaactaatctcattgtctattattttagtaatgactttagaaatcacaacacacacaattacacttttgaagcctaaaggtaatcagtacctttaccctcttcctagagtgatggaagggataaaaaccaacaacaaaaaaattcttttttggtctccataattgtaatgcttgaaccctattatctccacacctaccaattgaatatatttttgcaatagtgtatctttaaatatcattttttaaaatccccacaagatattattattaatgttgatacagtgactaattgttttgtttatacaaatagttaccattttctttcctctccattatttcatgcatcttggatcatccttccagaagtacctcctttaatagagtgcttcttaaactatctgtggtgaaagacttgtcttttttttcttttaatcatcacagcctagtattttttaaaagtacaataacatgaattactagaggaaaaaattaaatgaaaaaaacaaagacatgcaaaatacaaaccccacatgtttatttttggattcgacagacataaaagtactctgtcaaattgttgtaaagttttcagaatgcttcctttcagttcctggacttctgtcttctggactgggagcgaacactcacaggctgacattaatccatggacctgactttgaggagcactgcttaatatttttccttagtgaaaagtttccctgagttctgtgaactgctccagcaaattaagaatgcaaggagggggctgtgagaatcccaatttatagccagtcagaagagtaagtgacaacctactacttatgattagcatctgaatttgggggaagtcttgtaggactgagccctcaacctataggatgtaatgctatctccaggtagatagagtcagaattgaattgaattagaggacacccagctggtatccacaggagaagctatgaagattgcttggtagggagaaatctccgcagatttcggtgaccgaggtcacagaaatattccatgttgattgttgagtgaaagactaggaaaaacactttgtgtttttttgtatcacaacaactggaaacaggaattcctgttactactttgtatttcgtaggagggtctcttgttccaggttgattaagaattcctacttagaaatacattcagaatgttaatatacattttattaagttccaaatttgttttgagtacaggaactctgaggcacatgtgtgtatacgtatttataagcataacaatttatagatacattgttatatttgtcttattattaaatattattttgccatttgataaccccttttccagtagcccaccttacattggtataatgtggaagaacagtgttttttactaaagatgttaattacataatattttatgtttctctattctttagttagatcatggagtttaggacttgggctgccatgttacccttgttaacagtatgcgatataaaagagatctaatcctgtgagtacaaaatgagggaagtcataagagattcctaagaagagaaacttgaactggggagagacttactgcattaaaaatgtattaaataagttaaggactcaagggatctatgctgatgctaagtacaagactattcctgttgaacaataggaaaaaaggaaattagatgtagcttgagatcacttgctcattaatttcatcattgtgttaaggaagaagagacttaggattcttaatttttttttttagaaaaacctgttaataactgtaaaatggaatggatcagacaaaggatttgaaaagttgagattctggtttgtgtcccagctttgctatataagagttatgtgtgaaattgggaaaaatatgtaatgagacttcgttgtaaaattgagataataatagtatttaaatcaatagttgttgtaaagttaacataagagacttgtcagaaaacttggtgtgattgttaattttctgggtcacaactgggctgaggaaggcccagagagctggtaacacattgtttctgggtgtgtctgtgaggatgtttctggaagactgagtaaagaaaattgccctcaccaatgtgggagagcatcatttaatctgttgaaaacccgatagaacaaaaagctggaggaaggacagattcactcttcttgagctgggtcatccatcatctctcgccctgggacatcagagtgcttggttctcaggccttcggactccagaacttacaccagtgctcctctcctccacactccgcttccccagccctgaaacccccttctcacgccttcagacttgattgggaggtacaccacccacttccctggttctcagggtcatggatttggactaaattacatgactggcttccctgggtctctggcttgcagacagcagattgtgggacttcttggcctccataatcatgtggaccaattcctcataataaatctctctctgtctctctctctctctctctctctatatatatatgtatacacacacacacacacacaaacacatacattatacatcttacatatatatgtatatattatacattatatatatatatattttatatctcctattggttctatttctctggaaaaccttggctactacacttggtaaactgtagagcagaattctgggtcacagttccatgaccttagtctaaaaggtttttttttaagtttgaattaggtgtcgttttttttaacttttaattttatttttaattttttttctgtagagatgacatcttgttatgttgcccaagctggtctcaaactcctggccacaagcaatcctcctgcctcagccccccaaagtgctgggatgacaggtgtgagctaccacacccagcaaatgtcatagtttaaaaatttgaatttctagcttctttataaaaaatcaactttattcaaggattatttatataagatacaacatcttatttatttatttatttcagacagggtcacactctgtcgcccaggctggagtgcagtggtgcagtcatagctcctgcagcctcgaactcctggactacagtgatcctcccacctcagcctcccaagtagtcgggactacaggtgagtgccaccatgtctggctattttaaatgtacagtcccaagagatttgtgcaaatgtatagacctgtgtaacaatgaccatagtcaaaataaagaacatttccacccaccgaacacggctccctcgtgcctttttgcagtcaacctctcaccaggaaactggtcccagggaactatttgtctgctttcagtaactatagctttgttttgccctttctggaatttcatgtaaagggaatcatgcaatatgtactcttttgtacctggctgtctttgcggagcatcctgttcttgagagtcaaccatgctgtgtgtgtcagttatttattccataatactgctgggagtcatggtgtggatatcccaaaatttgtttattcatctattgatggacattgtacttattcccagattttggttatgatgaataaaactactatgcatattcccgtacaggtctttgggtagaagtatgttttcttttctctttggtaaatacctaggagtgcaatagctggactatatgggccatttgcttaacttcattctgtcgcccaggctggagtgcagtggcataatcatggctcactgcaaccttgacttcccaggctcaagtgattctcccacctcagcctctggagtagctgggactacaggcttgctttaccacacccagttaatttttgtattttttgtagagccagggtttcaccatgttgcccagattgatctctacaaacaaaaaaattaactgggcatagtggtgcacacctgtagtcctagctactcaggaggctgaggtgggaagatcacttgagctcagaatgtggagattgcagtgagacaagatggcactactgcactctagcccaggtgacagagtgagaccctgtctcaaaaaacaaacaaccaacaacaacaacaaaaaaaagcaaaaaagaaatcagatttctagaaaaaaaagaaattgaatttctaattcataatgatggcatatctcactgatttaggtagtttaaatttttccttaacaattttttttttagttttcaatttacaggtcttacatatgcttgttaattttattcttaagtattccatggtctttgaagctattataaatggtacttttttaacaaagtaaaaaatttcaggtaatttgttgtcagcatgtagaaatagaattgatacttgtatattgatcttataggactttgctaaattgacttattaatttctaatagcttttatgtaagctccatatgtatatgatcttgtcatctgcaaatataggcaatttgattttttctttcaaatatgtatgctttttatgtctttacctcattattctggttagaatctccagtataacgttgaatagaaatggagaggggaggtggggtatttcaccattaagtaaaatgttagttgtagttttctcattggggccttttataaggttgagaaaaattccttctattcctagtttgctacaaatttttattataaatttatgttgaattttgttcgaagcattttttgcatctattgggatacttatttagtttttatttttgttctgttaagatggtaaattacgttagttgatttttgaatgttaaaccaaccttgcattccctagataaatcccatttggtcacattgtattatcctttctatatatcgctggtcttgagttgctattctttaaaagaattttgcatctctgttcataaaagatattggtctgtagtattcttttcttgtgatgtcttgttttcagggttattttgtcctcataaaatgaattgcgaagtgttccttttactctattttcggaaagagcttgtgtttaaatgatattatttctacctcaaatatttaatggaattcaccagtaaagctctgtaggcatggagttctttttctgtgggaagactttgaaaaattcagtttattgaatggatatggaggtattcagattttctgtttcatcttgtgtcagttttggcatttcatgtcttttagtaaatttttctatttcaggtaaattgttggatttattggcataaagttaatcataacattcttttacactcctcctaaaatcaatatgtttatagtgatagcccttctttcattcccgatactggtaatttgaatctcatttattttttaatcagtcaagatagaagtttattaattttaatacaaatattatgtttttaaaagacaaaaagaaaaatattttaaatattttcatagaaccatagaaccatcttttgacttcattttctctattgcttttctattttctatttttattgatttctggtcttgtcttcattattttcttctttctaattgctttgagtttaatttgtttcagtttgttgagatgggagctgatatggtttggctctgtgtccttacctaaatctcatcttgaattgtactccaataattcccacgtgttgtggaagagacccagtgggtcctgacctcaagtgatccacctgcctcagcctcccaaagtgctgggattacaggcatgagccacagctcctggccaaaagcaagaatattttctgttgtgggatatattgttttgcaaatgtcagctaggtcaggtttgttgttaatgttatttgaggcttctatatccttacaaattttttatctacttcttttatcaattgctgagagagggctgttgaaatttccaaatataattggggatttgaccatttctccttttagttatgccatattttcttcatgtctttagtatcattgttattgggtgcatacacattcaggattataatgtcttcttaataaattgatcctttatcattatgaaatgtccctttttactaatgggcatatactttttcatgatgtctacttcatctaatattagtatagccattccagctgcttcaggatcagtgtttgcatggtatatttttattattcatctacttgaccaatttgtgtttttatacttaaagtgtctttcttgtagacagcatatagtttggtattgctttttttttttttaactctgtatgataacctctgccttttaattggagagtttagaccagtgctcattaatgtgtagtctatggacccctggaaatccaaaggcctttcaggggtgtttgtgagatgaaaaccatcttcataataatactagaagtttattttccttgttcatgtagggacatttgcaataattgtgtaaaagtgatggtggagaaaaactgccttagcataaatcaaggcgttcacaacaaactgtggtgtagtcagtgccattcaacatgtacttgcaaaaaaaaaaaattcaaatttcacttaaaaatctctggatcaaggagtgaaatattaattttattgaatatatgtcacttaaatatttgatttattgagttggaaatacatataaggcacttctgctgcatattgaagtataacgtcctgagtaaaagcatttgtgggattattttagttgcaagctgaactagccactttttaaatgtttaaatgaaacaccacttttacttaaaaggacaactaacaaaatatgttaattcaaacttggatatatggcagcaattttctcaaaaatcaatgtggtgatcctgacacttcaaggaaaattactgctgtattttttgccaatggtaacatttgagctctcaagtaaaaattcgaagtttggaaaaattgtacttgtcaccatgaacttgacagcttacaatagatgagatcagtagtgatatgaacaactatattttttcaatattgtataatgtaatatatctacaaaactcagcaagccaatactttccaaatgatgaacgcatgatgccatgcaggtaaaagaaccattcaaattgctagatagataattggattttaatgtacttaacagtgagaagttcaattgatccgatttcatttcccacattttaactaacatttaagcaactaccacttgccaagttttagtatagtatcaaagatgaatatccacatgtatacaaaaaagatattaacatattcctcttttttccacctacataactgtgtgaagccagattatcttcacatacctcaaccaaaacaacatattgcaacaaattgaatgcagaaacagacaggagtatccagttgtcttacatgaagctagacattaaagaagtttgcaaaaatgtgaaacaacattgttattctccctaaatatttttgttttgaaaaatatagttatttgtccaaaaagtatgttgtttgtgttgtgttattttattttattttattaattaatttatttttatcttttgagatggagtcttgctctgtcacccaggctgcagtgcagtggcgtaatcttggctcactgcaacctccgcttcccggcttcaagtgattcttgtgcctcagcctcccgagtagctgggattacaggctcctgccaccatgcccagctaatttttttgtagagacagggtttcactatgttggccaggctggtctcgaactcctgacctcaagtgctccacctacctcatcctcccaaagtgctgggattacaggcgtgagccactgtgtccagcctgtatgtcttctttgaatcaaatgttgtaactgaatgtttctggaggaaagagatttctggttttttaaaatttcattattttttagttggattgcattattgtcagacaattctttggaatttattgaggttttctttatggcttgatatgatcatttttcatgagcattgatgagaatttaagaagtaggtagtttctagtatcgggcttgagagcacaatatatacctgtacatctacctcattgatttttgtattcaggttttctgtggcttcactaaaattgttatccctgtgatctgtcttggtttgagaactatgttaaaattttccattatttgtatgtttctttttttattatactttaagttttagggtacatgtgcacaatgtgcaggttagttacatatgtatacatgtgccatgttggtgtgctgcacccattaactcatcatttaacattaggtatatctcctaatgctatccctcccctctccccctaccccaccacaggccccggtgtgtgttgttccccttcctgtgtccatgtgttctcattgttcaattcccacctataagtgagaatatgcggtgtttggttttttgtccttgcaatagtttgctgagaatgatggtttccagctttatccatgtccctacaaaggacatgaactcatccttttttatggctgcatagtattccatggtgtatatgtgccacattttcttaatccagtctatcatggttggacatttggattggttccaagtctttgctgttgtgaatagtgccacaataaacatacgtgtgcatgtgtctttataccaacatgatttataatcctttgggtatatacccactaatgggattgctgggtcaaatggtatttctagttctagatccctgaggaatggccacactgacttccacaatggttgaactagtttacagtcccaccaacagtgtaaaagtgttcctatttctccacattctctccagcacctgttgtttcctaactttttaatgattgccattctaactggtgtgagatggtatctcattgtggttttgatttgcatttctctgatggccagtgatgatgagcattttttcatgtgtctgttggctgcataaatgtcttcttttgagaagtgtctgttcatatcctttgcccactttttgatggggttgtttttttttcttgtaaatttgtttgagttcattgtagattctggagcttagccctttgtcagatgagtagattgcaaaaatgtgtatgtttcttaattctccttttctgctgtattctattgcttcggtttcctctttttggttcctattatatgtatattggcttttgtctattttctatatctatctctttcttttaagaatctgctaaatttttctattatttgcatgtttgttaattctccttttcttttctgtgttcctgctctgtgaaaatctgtgctattttattaggtatataactatcaataactattatatcttcattgtgactatagcctttaacactataaagtgcttttaacatcactttttatgctatttcatcctggatttgaccttgtaagatcatgattgtagaccctgtcatttggtctcagttcttcatgtgactatttacttacatagggctcaacactagttcttgttttgatgtttcgctagtcttttttattttttgaagccctggtagatttttctggacgtccctatgggaatagtattatgtgagttcttgcctgtttgtagcaacttacctgtgaccttcatacttgaaattaattttgcctggatattaaatccatgatttacattttctgctgtagaaaactctgatgacaatctgccttttatccttccttacaagagtcttagttttttgtttgaagtctgaagcattgtttttacaaaaaaaaatccaacatttttactagttgtgtaccctttcaatatatagtttcaagtcattttttatttcaaaaagtttttttgaattaaagaaaactttttttttttgttttgttttttttgagacagggtctcactcttgttgcccaggctagagtgcagtggtgcaatctcagctcactgcaacctccacctcctgcctcagcctcccgagtaggtgggattacaggcgcccaccaccatgcctggctaatttttgtatttttagtagagatggggcttcaccatgttggccaggctggtctcgaactcctgacctcaagagatcctcctgcctcggcctcccaaagtgctgggattacagataagagccaccgtgctgtgccttgaattataatttttaatatttattctgttctattgttttcattttctctttcaggttcctgttacatgaatgttagccttttgtttatcttctttgtctttctttcaaattcttatcttttccttaatgtgtttttttattattattttttaaaacttttccatttccattttctatttctcttaaagcatatgtgtgttccttctggttttgtttttatttctaaaattatttttattttttctaattctttcttgagttctgtcacctgttttcttaaatatttgttttcaataattatctgattttttcaattttgctgattttgatatgtgttgtcatctaataatttttaccatgcttttatttttttagtttttaaaaatattaaattataattttcgtgagtttttttatgggctcgtttttctggcatgattttattatctacaggcatgttattctactcttgttttctttttttcttataataactttgtaagaaatttcactgtaatcttttttcctatacttttaggagaagtgcagaagatattttcttgctctatagatctaaaaaatctgtgtggggtttttttcctccaaagtgaccaaaagtaatttctaagatttgtttcctttttctccttactttgctttccaacttttaactagatcttctctttatttgcccttgtagttcaaatcctgcctaacctggattctcttttcagtagtttgccctcagtgcagaattttgtcttgtagaggagatttaatttgttaattttgagagtttatgagaccccgactgctccatttgatcttttctatcattaggcctgattacaacatggtccctgtgaatttgcccataagttttatcctgcagacccccctgtcagtttcagccattgttctcagatgaacttgcacgttgtagtgagtaccacatggtgacttttgttgctgtcatgatctcaaggccattagaggatcattggtcattacttttttcctccaatgcaaatactgatactgctcacatcctgtaggtgagggtgttgtgtacttgggggaccacaaaaatacttgtcacctagagttattgtgagagatcactcatgagtcttctgtttcgctatcttagttgctgtttatgtttttcggggaatttaaggagattatactgtcttggatgcctccttcttactaatcctttttgatgcccaatttgtgccatttttaacctgtggaaatacatttggttaggcttctgtttcctttagacatgatcccattagttctgcatagttttcttactttatggcacaaaaagacactcaaggcttatcttagtcatcgcctgctccagtctttgaatgaacatttctacaaagagcttccattccttttatccatcagacttttagtttatctatctaagctgtgaatcattatctttattttttattttt

SEQ ID NO: 475 - DNA, 20001 bp, Homo sapiens
ctgaagatttttatttaagaaatgactaagaaaacaagttttgaaatactcctcaaggattattctaatttttgaaataaatacaccagtcaaagaaatagacatatacacgtcactgaagtcagctttgcaaaatagttaaaagcactagcttggtagtgagtttaaacctaagttcaaatcccaaacgtggtgattactgtgggaccctgggcaggctacttaacataggcctcaattttcttacctgcaaaattggactaataggaacaaactgagaaggacactgggagaattaagcgtgacaatgtacacaatggacttaacacagtaccaactacacagtgcttgtaagttgctcttgtcactgtgcagactcaggtaaaacatcaaaaccaactgtgatatctacttttaaaatctgttgacacttaagtcattagctttatgcaaattcaaaaccttttaaatatcatttcatgactttaaatatactgtgaaatattaaatacgttaaataatatctgtttattataaagctgatcctgagaacataagacaaacttatcgatagtagcccactgctaatgaagtgcaaacttcctcaaatgataaacatgccctggtccttctatacttaacattgtttcttctgtcagtcataggaactgtttataactctccacgtttatcaagctgtttcaagttctttagagagatggttccctacaccttcaatgcattccatctcccactgcagctaatctcacacacacacacacacaaagccccctacacaaaatcctacttgtcctaaattagctcaagtgtcatctcctttaagaacccttccctgatctcctcagatataaattgatattaatataaatggcaatgtcagaactataaaaggaggcaggagagatgagacagaaaagggacagaatacataccaaaggaagacagaacgggggaaaggagcctgagtaaaatattttccaaatgaaagcgtctgacgcactggagaacttccacccagtgctgaatgtaaaaaacaacaacaacaacaaaactattcaggatgacaatgcctagccaatgaaaaagtaaaaccttatagtaacacaaggtggatactgcaggttagattctccaggaagcagactctgacacatttgtcaagtagaatgttaatgagggagtgcgggtgagaagaacatctgttgtaaggaggagaagaaacaggaattgagcaaagaaagaagttgaacagatgaacttcactgcagacccaatgagagccacggccaacccttcagggagcactaaagtcagcatggcccttcagaattgagaaagggcaagagagacagccaccctacatcaaccagccattgggccacattgggatgaggtgctgcattcaattagatttcaacctcagattatgatcttgagaacctgatcgctgactttttagaattcttctcccatttggggcattatttcaaatagaaatacctttattttgaaaggtgtgcttttttcctatcaggaaataaatacaaatttcagttgcaagtacctaggactatatatacaaaaatcattctctcattctttatccatgctattgagatagttgtaattatcaatgataaaaatggttatgaatttacaaagcatatcttttccttccattctgttttactgagttcaagctgagacacctttttggtaacttttctagtattcctatcctcacaaatgataaacgagaaaatttaaactaatgttttggctgtttctgagatctgtcatgcaatttatgcttcacataagcagcacacaagagtagagaactaaagtcttgcaaaccagcaaaaatcacactgtctggcaatctctcagactagctggtcatagtctctatttttctggcccagaaatatttctacagtaatttttcaaacttttctcattttttataatttcagtaacattagcatactatgcataaagataagcacttaagacttcttgcctgacgctttcacaagagcactttttctgccacacaattgtctcccagagtgaaaaaagtagagacatgctcctacttacaaacaaaaataacatctggaggttattaatattcacattaactacacacatacacacacacacacacaatgttcattctcaatcccacataattagtctgccaggcttcaagcagaataatccataaccatcttgacatgaaaaaataaaacctggccatacagttttcaaacacatttctctaccctaaagctcaaggacaaaaagtgagaagaaattctactttgggcaaatgaggttcctgaaactatagcacttgcataaattactttagaaaactagatcagacagaccagatcacttaacaatgaatatgttttccctatatctgaaacattctccagaatggatcaactttttttaaaccagaatatcattaactgagataatgtagcttaaatcccttcagtatgtttattcaccatttggagtgtccaggagcacagagaatgtgggaggaaaaaaagataaatcaacacagttaaattttaaggcaaaaggaagggtctgtatacggcacagaactaagaatttttctaagtgtgactgatactaacaatgaaaatccgtgaataaactttggaagcaagggggaatggaaaaatacatatattttagctttaatgcatcagtacaacagaaaacaaaaggtcactcaaaaactgtccaaaacctaagtagagtacatattccccaagtacaggagaatacataaatttttacttgccatggtcaagttttctcaacatgagaagatacagattcctcaataaacacataccctctgattagaatccagtttggtttgatgcagtggattgtgaaccatctgcatcacaatgacctgcaaagcaattaaaaatgcaggtttctaggctccactctagaactagtaaactagttaagactcagaaagccgcactgtttaagaacttgtaggtgattctcttacattaaagcctagtaactgtttttgtgtagactctgtaatggtaacatatttgctccaagttatattttattcatttttacaactattttacaggttaaactcaattcaatggcacaacagttctgaagtctaactacacattacaattccctaaggagcctttaaaacataccaaaacctgaatctcaccaactacaccagattctctagggataaagagagggtatcattatttattaaaagctcccttggtgattctaatgtgaagcgatgtttcaaatacagctcagaagatgctatatattctaactaggaaaaaaaaaagtctacagaaaaaaatgaaagaaataatgtctggaagctgaggacaccgatattttcagacacataattttcccagtatgatataaagaaaactggaaaatgatactgcccgcaaaaataaaatctatgcgaagccatgaagtcttattttaaggaggcaaagtttctagcaaagacaataataagataaccaccatatccattttaattgaatagaacttttaatgtcaattaaacatcacaaacttctatttattaatgaataagaacaaatttaaaagaaatcagacaatgaactagacttctaaaggaaggggtgggctgaaatatgcattttaattttgctccctcctaaaaccccattacaatcgaaacaagctttgtaattgtcattactgtgtgtgtgtgtgtgtgtgtgtgtgtgtgtgtgtgtgtgtgtgtgtgtgtgtgtttatggtaaaaattcataggcagcagagatgagtggaaccaatcccagtcctgagctgcgccccagaaactccagggctctctgcacccatcctgcaatggtgaatactgaagaaatgaggaagagtacaagcagtagaggacaaacaggctttccggaggagagcctcaacctaaagctgaggccaatagtgggcaagggcaggaggtccaggctgctgtgggctatgatcacacccctgcaccctagtctggatgacagaagaagatcttgcctctaaaaaaaatttttttaaatagtaggcaatgggaccctatgctccaaccctcttctttctttctgctcctcctggacgtacccacagtatgttacttgtggacactcgaatcttctctttccttccaagacctcactgagtcactggccctctttactcagggacattgtgaatatgcaggacccaaagaatcctgcagataggcactgtgggaccaattacttctgaaatattgacaactatagctactattggagtttactgagcaacaggatgaagaaacagcagcatctgaagcattcatttaccttcagcattgatcaaatattttaagcagtactggtctcttttgctactctaaagcatattccctcatcaagaagaaacgtgacaagtgaacctaagagttacagaaccctcaaagagaccaagtgataattaacttggtccagttttaccagcaagtatatgaaagctggtatcttagtgttttttcttcagtgtccaagttcagacaggttaagcaataggttcagacaggttaagcaactttcccaaggacacaacgctactaagtaaaaaagccggagaacttcaaccttgatgttttaattgccaaaagctatgccctgctacactacaagacacaggaagttttctcaaattttaagtagaattacaccctaattaagtgtaaaaataattcacaggaaataaatttctgcatggtccagaaaggttatatccagggaataaactgatatagcaaaagggagaagagaaagatagttaccctcgtttccaagagtttaaacagaaatacacctgggaaaacctgttgtcactgttctcattcacaacctactttttagtactctttaagtgcaacctctctggtaactgattttatgcaaaatttttcctgtaaatctgttcatcctgcagcaatctaatagtgcaatacttcttgtttgcaaacttttaatgtaaaaagatatcacatggggatcttactaaaatgcagattctgactgagtatggctggagtcgggagatgctgtattctgggggtagaaaaaggatattgcagtatccccttgactagcaaggatctagtgcagtgctgtgtcatactatagaaataatgcaagtggtatatattgttttaaatttcttagtagctactttaataaaacttttttaaaaggtaaacttaattgttgtaatatattttgtctaactcaatacatccaaatcattatcagttcaatgtgtaatcaatattctaaaattaatgagattttacattctttcttcatactaagtctttgaacacagcttgaattttccacttacagtacacattttaattcagaatagcaacatcccaagggctcaataaccacatatggctagtggcttccttactgaacaaatataagtagactgaattttagctactctgtacctctagcttgcttggaatgtttaaacagttcaaaatttatcattagccaactacataaagcttagctgtggtaccagtggaattgaagagtgcttttatttgtttcttacattttccttttgtcctgacaattcatgactgagtgctgcagcacaggacggatataataggcagtgaaatagactctagggaggggtggcagaaggctgggtgatggcaggaatggtagtgggaaaacagaaagttagtgtattttcaagatataatcttggcatagtttaggagaaaaatgtggaaaagatgtttgcttacttttatgaatacagatgttttcactaaccttttaaaaatctaaaataaagatctggtttagataccaatttaaataccaaatattcatttttaaaaaacagctaaagaagtaaaagacagctgatccacagcaaaacaaaaagtaaattcaatactcctgtcagagagagccaaagagatttctacatgccaggatttcccaaagaacattaagcaattaagatgaataatgtctatgatactcaccagaaacaaagtttcagccaaagaaagaatccactagacatctgcccagataagatacttaaatcacattttgggactacttgaagtaaatatgaagaagcagtaccagaaacgtcagggtggaaataaaaagataccaactcaattcacttgttggctttcttcttgagtacaagtgaagagctgataggctccatggtgatgacgaaataatgaaataaaaaccaagaaacagctgatctaagtgcactgttgtccattaactgaggttttgcattcagacaggaaagcagtaaagacaacagatgtcagcaccaatgtcctatgcactacaccatccacattctgtcatggttgcagaattctcagaattgggctggaatatatggcaagagattcaaatttcagaaggcttgtaggatctaaatccagattgtaaaatatctaaaacagaatggtcatgtattaaaatcttggtagttcaaaccaatgacagtgaaggaaaggaacctacatttattgaggtttaagtaacagccataagaattacatcagtgaaaacagtagagtgagtacctctgaaaattctctccttaactttttcaaaattctggaaattaactaaaagcttgcagcaatccatggaacattttttcaagaaaaacagctgaatctccgtaagaacagcaaatttaatggtatttcaacttaccctattccttccctctgatctgcagctccacagtcaccatgaaaaccagcaacacataataccactgaaagccaggagcctggcagccaccaacggattttaagtgccttcaaagcctcattcccagagaactgtcattatatcaacctatccggtgacatcctcaaacacgctacttggactgtctttatttgacctgactcacagcttggctagagcaaaaaaaaaaaaaaaaaaaaaaaatctcttccccacaagcatttgcctaaaatatttagagggccaggtggggtggctcatgcctgttatcccaacactctaggaggctgaaccaggagaatcatttaaggtcaggggtttgagaccagcctggacaacatagcaagactctatctctataaaaaattaaatattagccaggtatgatggtgcatacgtgtagtcccagctacttgagaggctgacacaggaggataccttcaaagagtttaaggctgcagtgagctatgatcatgccactgcactccaacctgagtgaagggtgagagcctgttttgcaaagaaaaaaagtattttgaggcaattatttaatgttgtggctgcctgaaatggtagaaagcagtaggacaaagataaatacactaatgaaaaagcttaaaagaaaaaactgagaagtaagatgcccatggagactttgaaaagtttagacatattcctgaaaatctcaaagtctattcacatgtacagggctgtgtgtatgctcagaactgtgtacatgctcaaagaagtccggacaagactgactcagaggctctgtgcaagaaggaagtgatggctaagcaaagttatcaaatgtctggatgactgttaaaggagtgtaccaacacacacaaagagcctctcagcaaaaactgggaaaatgactggtcccaggagtttaaggaaatctgtacaatcactagctgaccacaaagccatttgaacagacttctgtggccatgcacagagaatacaaactttacagattacagaaaagtcacctaacaaataaaaaacaacaaacagcaacaataaggatcctggagccaaatatgattttcaaagttgccaccccactatattatataaaatgtccagtcttcaacaacaacaacaaaattacaagacacgccaagaaataaaatagtatggcctatacatagagggaaaaacaatcaatagaaactgaccttaaggaaacccagatgttggctgtattagacaaatattttaaatcaattatcttaaatacgttcaaagaactaaaggaaactgtgcaaagaaagtatgagaatgatgcttcaccaaatagagaatatttttaaaaagctataagaaccaaacggaaattcaggattgaaaagtacaattactgaaatgaaaaattcactagaagggctcaacagcaaatctgagaaaatggaagaaaaattcttcaaatatgaagataggtcaattgagattatctaattcttcaaatatgaagataggtcaattgagattatctaatccaaaaacagaaagaaaacaaaatgaagataaaggaccaatgcctagagaactgtaggacaccatcaagcacacttgcatacatacagtgagaggggaggagagaaaggaacagaaggactatttaaagaaatcatggccaaaacctttacaactttgatgaaaagcattaaaatctgtatatccaaaacaaactccaagtaggataaactcaaaaagatccacacctacataccataatcaaactatccaaagacaaagcagcaagaaaaaagtgacacatcacatacaagggatcctccataagattaacagctggtttctgatcagaaatcatggaggccagaaggcagtagaattacgtattcaaagtgctgaaagaaaaatgactgtcaatcaagacttgtgaaacaatgtcattttccccctttcttccctccattatggcattcttttctgttaaatattttccagtacaaaaaagggaaaaaagaaattgttaacaagacacataaaaaactaacagcaaaatggaagaagtaaatcctatcttatcagtcattacgttaaatgtacatggataaatattccaattaaacattccattgacagaatggttaaaaaagaaaaaaacatgatccaagtatatgtttctacaagagacacacaacacactatatccaccaaatatgatgaaattaagacattctcagataaacagagactaagagaatttgtagttagaaaatctgccccacaagaaataataaagggagtccttcagactgaaataaaagaacactagattaactcaaatgcagatgaagaaataaaaagcacaggtaaagctaactacataggtaagtatgaatgacagtataaatgtatttttgcttatattttatttttcttttcttcttctacctaatttaaaagactgttgcacagagcaaatcataaatttggttaacgggtacatgatgtataaagaataatttgtatgaaataacagtacaaaggaaggggaagggaaggcactatatgggaacaaagtttttatatactattgaaattaagtgagtattaattcaaactagagtgttataaattaaattttcaattgttaattataatccccagggcaaccactaacaaaataactcaaaaaatatactaaaatacaagataaggaaattaaaattatgcactggaaaatatctaacaaaaaagaatgccataacggaggaaaaatgggaaaaaattacgtaagacatagaaaacaaatggcaaaatggcagaaataaatcctatcttatcagtaaccacattaaatgtacaaagactaaatattccaattaaacattacattgacagtttaaaaaaaaaaaaactgaactaaacatgatccaaatatatgctttctacaagaaacacactttaaatataaagacatgaataggttgaaagtgaaaggatggaaaagctatttcatgaaaacaataccaaaaggagagatgaaaatggctacactaacatctaacaaaataagactttaagaaaaaaactgttactagagacaagggatactttagaatgatagaggtaaatttgtagcagacatccaacaacagacacccaaaatacatgaaacaaaactgacagatttcagaggacaaatagacaatgcaacaataatagagacatgtatcccactttcagtattggataaaataattaaatggtcaacaaggaatagagacctgaacagcactgtaaatcaacctgacctaacagacacctacagggtattttacccaacaacaataatatatacattcttctcaagtgcacatggaacattttaggatagaacatgtggtaggtcataaaaccaatcttgatacatttaaaaggactgaaatcacacaaactacgctctctaaaaacaatggaacaaaattagagattaataacaaggagatctgagagatatacaagtaagtggaaattaaactcactcctaaataataggtcaaaaaagaattcagatgggaaataggaaaatactttgagacaaatgaaaacaaaaacacaatcaccaaaactaatgagatgtaatgaaagccacacttagaggaaatgtatagctgtaaatgcctgtattttaaaaagtagaaagatttcacatcaataacctaaaatttaaaaactggtaaaagaacaaactaaattcaaagcaagcagataaaaatagtaaaggtatcagagcagaaagaaatggagaacagaaaaaaataagagtaaaatcaacaaaaccaaaagttagtccttttaaaaggtaacaaaattgattcttccttttaaaagacaacaaaattaactatttttaacccatttaaaagataacaaaattggaataccatgtagccataaaaaggaaagagatcatgtcctttgcagggacatagatggagctggaggccattatcctcagcaaaccaacacagaaacagaaaatcaaataccacatgttctcactattaagtgggagctgaatgatgacaacacatggacacagggagagaaacatcacacactggggcttgttggggaagtgggggaagggagagcatcaagataagtagctaatgcatgcaggcttaatacctaggtgatgggttgacaggtgcaggataccaccatggcatacgtttacctacataacaaacctgcatgtcctgcacatgtatcccagaacttaaaagtaaaattaaatgtaaaaaaagataacaaaattggcaataaactccattaaataatacacgtaattttattaaatagtcacaaccacctatgaaggtacatttggctatgcccaattcacataaggttgtgagttattacatcacttaccctaggacgcagaacaaggggaaaaaagttaaaatttaagccttatgttttttacagaatgctgtaccacctggacaagtttctggatttacaaaaatctaaactctgtattttaaagaatacaattatcttaactgaacttgcttttgtcaaatataggcttttaattatactattcttttggcttaacttgggcattattgcaaaacattagtcttcattaacttactaacctcacatacttataaagtgtgtactgacagaaaaccaaagggaatttgtataaacagatgcaatttatttataattaaggcagaggtcacatgtaaatatttgaaatatttgaaaaaatatatacaaattatattatttaaataattttctggaagttatgtttatattaattagtgaacctttgaaaaaactttttcccctaattaaactttttactactcgctcaattatcaaatgctaccaattatcaaagagctaattcatatcgtttttacactatgttaagtctataccaccactatcaccactactgtgcaatcccaatgctgccttaactgcaaatttaaggctgaaaagtctatagagctctaagaacacaaaaggtagcgtagtggagaggctatcgactaggctaggggccacaggaaaaccacgatatatctgaatcccttaaaatgaatcaatgtttttaaaaatccaattacttaaggattttcacttgcatcacttttggtagaacagtctgaatattaagatatatatatgcataacattaatatggcccaattccaagcaacaatttttttgggggtgggaggcagggtctcactcacccaagctgcagtagagtggcgcgatcccctcactgcagcctcaaccttctccgactcaagtgatctgcccacctcagtctccctagtagctgggaccacaggcatgccaccacacctggctaatttttgtaatttttatagagacaaggttttgccatgttgcccaggctggtctcaaactcctgggcacaagcgatctgcctgtctcggcctcccaaagtgctgattacaagcacgaaccattgtgcgcagccttaatatatttttaagctgctaaatgaaaaacgaagttatatgctactgaagaattgggacattgggtggcactcttgtaaaagaaataattactgtaacatacaggttgagaaaaacctaaagtttaacattatactgcttggccaatccaaattatttaataaaatctactttaaaagaaattacttgtttcccaaatccaccatccatgtctttgaggaaatgtttcagatgttattgaaaaaagtagttgtttttggacgtggataaaagtcaggaagcatttgtctttcctctccctaatctctctcatttgagtttacagtgagaatacaagcagaaacatacaatgatgcaattatattccataacatatttactgttttattctacttacttttttaaaatttggttataaaatatctcacaatattttgttaaatatggaaaaagcaaacaagtttagtataggcattgtgtcttctccaagctatattagtgacatcaaattaaactagaatatatttttaaaatattatttctcatgtataatatttcacaataagtatgtgcctgagagtaaaactttttaaaatatctttgagctaaattatttcaacaggaaccatatcaaacatcatacatcaaatcaataactggttaacttgtaaaatataaaaatccataaaaaagagcccaaaatttaatatattatccaataccataaagtaatcattttggccaggcacggtggctcacacctgtcatctcatcactttgggaggccaaggtgggcggatcacttgaggtcaggagttcgagaccagcctggccaacatggtgaaaccccatctctactaaaaatacaaaaattagccggccatggtggtgggtgcctgtaatcccagctactcgggaggctgagcaggagaatcgcttgaacctggatagcagaggctgctgtgagcccagaccacaccagtgcactccagcctgggcaacagagtaagacgccatctcaaaaagtagaaaatttaaatttaaaaagtaatttttcatttttacatagcacatactttgtgtttcttgtgcaaatatttactgtttgttattgttacggttttctattgagacatcctgccctatttttgacagctattaaacatgtggctaataattttgttttctgattacagatgaaatctcagtacagacgcacttttttgttaaatacactaacaaggaagttagtgtatttccaaagaaaatgcaaaatgcttggaatatcttcaacattctcaaatgtaagtatgatgtgtgaccggcaaacaaattatatacaactttaaatttttaaaaaacctagggaagtcctggttccagtaacagtggagtagcttgtatttctccaacaaattctagttcttcaatggattctagctctccgacatcttacaaaaactgtcaactgtggacaaaacattacacaaccacttaagaaaatcagaggccaactataaaagtagtacacctaatgggatactgtataaaggtttgtcagtcatcccaactgaagacaactttgaagggccatcccaattcagaattccctagagtcagctaaggcctttcttaagactgcctctcatgccggtaatcctagcactttgggaggcagaagcaggcgaatcacttgagcccaggagttcaagaccagcctgggcaacattgagaagccccatctccataaaaaatacaaaaattagccaggcctgatggtacacacctgtagtcccaacttctaaggaggctgaggtgggaggatcacctgagcccaggaggttaaggctgcagtgaagtcatgattgcaccactgcattccagcctaggtgacaaagtgagacggactcaaaaaaaaaaaaaaaaaaaaaaaaaaagagactgcatcacactcaacttctccctctactcacttctctgttcccatttcttccttcccacaggtgttgataccagtattatcctaataaacatcctttgtattaatcttggtcccatagagtttgagaaccacactcacgggtgacattagtgtagctacagattatctacgtatcagttagacagatattctgggtgatgaactaggaaacaggcataaagcactttacactttatacaacagagggctgtctccaagaaaagcacctgagtgactgaactagaagatgagttcatctagccccacttttcatggcatattatttctatttgaaagaatggtagacaaattagggttactcaaatgatgatatttccttaaaaaatgaagtgagccagtcatttcaaggaaaacaactggcgttattgttgaaaatgataaaatttgaactttcaagtaaaagtcagattctggagaatttgtatttgatactaggaacttgatagcttgatgagatcagtaatgatgttaatgatattaactagtgatcttacaaggccataaaaaaaaaggtgtcagccaagattgactctcatctgaaggctggggggaaaaatttccttccaagttcatgcgggttgttggctaaattcacttccttgcagttgtaggatgaaggtcccttgctggctgtcagaccagggccactctctgcttagacactggcatcacatgtccccttcctatcttggagacagcaatgcatgaccagtccttctcatgcctccaatctctctgacttctctttccgctaccagcctgagaaaacttctcttttacttccctctctcttccacaagggtcaggcctgcatagatctcttccagttgcagatggaattgttctctaacttgattggggtatggattacttaaacatatatatttgtcaaaacttttcacactgtacacttaagacatgaatttcatcatattccaataaagtatttatttttactggagtataatgctatttttattggagtataatattatactccaatgaaaacaagtaatgctaaaaaaaatgtaaccattactttaaaaaaagaatcctgatcttttagagatgtgcactgaaatagcaacagatgatatgatgtcagggattggctttgaaataatcatgggtggtaggagtggctttggataaaacaaaattggtcacatattaaagacttctgaaactaagtggggggtacataggagtttattatattctacatttacttttgtatatgtttgagaatttccataataaaaagatttttgacctaaccaactcacagcaggcgatacaaaatgacaaaaattctaatacacaattggtgtgaatacaaaataataaaacctctttaagaaagggctctgtctaactctaccaatgctgaaatggcacacacctttcaacccagcaactcacttttcggatgccttagagaagtcatgcacacatgcacaactgaacgtgtacaagactgatcaatgtggcatggtctataatattaaaaaaaaaaaaacctgcaacaatctaaatgttttggggataatggaaaaagtaactgcagtatattcatacaatgaaaatatatgtaatagttaaaatgaactgtatccatgtattacacggaataaatgagaaaaaaagcctgcagagtgatatactttttatataaggttttaatatactaaagttttaatattacatgataatatacaatatacagtctaatactatgcaatatacagttttaatatttatcatataatgctatatattttttacggatagacataatagaggtctcaacaaattcaggataactgttacttctaggtaaaaagaaaggaaaataatatcaggggttcaattgtataatatttcattttaaaaaaacctgaagcaagatggtaaagcaaaaggaattaatggagcaagtatgttggttcatgttccttgccgtactttcctgtttgtttttaaatatctcaaaatttttttaaaacaaaaaaacaaaggctattgcaataattcaaagaagagattactgacaaactatctaacattaaagtttttaaataagatttccttttaagaacttcatgctatttcagaactgtaaactattacatttcaaaatacccacagttaaatattgatctgaaagaagtcctcctgacaacaccaataatgtatatactataaaaaatgactaactctcaaaaatgtagtctaagcattgtgccaaatattttgaaactataaaaatatatatgtaaaatagtctactatatatttttccttaaaatatatatcctaaggaaatatgaaaaatgtaaaattttattaagtttaggtgacgagcacatgagtgctaagacctattatcttgtacttttctgtgtatgttgaaaacactgacaaagttaaaatatatcaatataatctatatatctgcaagaagaatggcaaaaatacatatactgttttctaggttatttttcccaaagatctccctactacttactcaaaaagaaaatcatttacttatttttaatctgccacctgaatgaatctggcaatttttagagaaacaaaaccacccctccagagtagggtggggatactcagcacaggaactatttatttaaaggggcgtctctgtcaggacaactaggtttttagcaacaaaaacctagcaacagaaaaaacaaacaaacaaaaaaacacaggtagttgttcttctatttcaatccctatttcaccattcccttagtttaccaggcttttaagtaggacttcactggttttgaccagtggcccccaaaaaatatatatccacatcctaatacctggaccctgtaaagactgcactatttagaaaacaactttacaaatttaagttaaggatcttgagatgaactcatcttgcatttcaggtgggctctaaatccaacaataattatccttataagagacagaagaggcacaaatacaaaagagaaggccacgtgaagggagtgtggccctgctgacatcttgatttcggactttagcccttcggaacttaaataaacttctgtaagctaccaagtttgtggtcacctgttatcttaccttctgaaacatttccctaccaattcaactagctacctaacacagcacctgccacgagctctacctggtctagaatttcaccccacgttgactttacctgctctagaatttcatctcacatttactgggctcctccctacactcttgcctgagctcctacccttaggtactatatgtataaatatgtgtaacctagtctaaaattgtcatcatctgtagcaaaagtaagtttgcaccatttttggtattatctgctcaaatacaagaactggtaaaatgacagggcagcatggacacaattataggtccataaaaacacagcattactgagcttggtcttcatataagagaaaacaggtggcgcttggttacatgaataaattcttcagtggtgatttctgagactctggtacacccaccacccaagcaatgtgcactgtacccaatgtgtagacttttatctctcccccttccccactactccccgagtcctgaaagtccctcaaagtccattatatcattcttatgcctttacatcctcatagcttagttcccactcataagtgagaatataggctatttagttttccattcctgagttactccacagagaataatagtctccaattccatccaggttgctgcaaatgccattatgtcattcataaacacacacacacacacacacacacacacacacacacacactcacacacattttctttatccactcattggctgatgggcatttgggccagttccatatttttgcaatgcgaattgtgctgctataaacatgcatgtgcaagtatctttttcgaataatgacttcttttcctccgggtagatacctagtagtgggattgctggatcaaacagtagatctactttgagttctttaaggaatctccacactgttttccatagtggttgcgctagtttccattcccaataacagtgtaaaactgttcccttttcactgcatccacgtcaacatctattatttttttatttttgattatggccattcttgcaggagtgaggtagtattgcacagtggttttgatttgcatttctctgataatcagtgatgttgagcatttttccataggcttgttagacatttgtataccttcttttgagaactgtctatccatgtccttagcccacttttttgtgggattgtttggtttgttcttgctgatttgtttggcttctttgtagattctgaatattagtcctttgtctgatgtacagattgtgaagacagtctcccattctgtaggttgtctgtttgctgattatttcttttgctgtgcaaaaccttttttgttgcattcacttttgggttctcagtcatgatgtctttgcatcctgaaactctgctgaattcatttaccaattttaagagctttttggatacgtctttagggttttctaggtatacaatcacatatcatcagctaacagggacagtttgacttcctctttaccgatttggatgcgctttctttctttctctgattgctctggctaggacttccagtactatactgaatagaagtggtgaaagtaggcatccctgtcttgttccagttctcagagggaatgctttcaacatttccccattcagtataatgttggctgtggatttgtggtagatagcttttattaccttaaggtatgtcccttctatgccaattttgctgagggttttcatcataaagggatgctggattttgtcaaatccttttcttgcatctattgagatgatcatgtgatttccatttttcattctgcttatgtggtgtaccacaattattggcttaagtatgttaaaccatccctgcattccctggtatgaaacccacttgatcatggtagattatctttttgatatgctgttggactcagttcactagtattttgttgaggattttggcatcaatgttcatcgggggtactggtctgtagtcttctttttttgttcttaatattttcttattttcattttgcctacacagatcaaaataaatgttgatgtgaatagtaaatctcacatttaaagaaatacaaatttccctttgtttataactcattcatcagttaaacaaatatttactggtcatttgttacatcctagctgatgagaaaacttcagaaaacaaaatctttgctcccagggactttacattctagtggggattacaaatgtttttaaaggattatttattgggtagtgataagtgctttagcgtgttaaaggaatgaagaatgctcaggactgctgctttagataaggctttcagagaactccttcctctgtgaggtggggacatgaacagaggcctaaatgaactgagtgcattacgtggatctaggcagatgggtgcacagctgcaaaggcctcggggtaagagcacacttgtgtccagtgtggtgcaacagtacg

SEQ ID NO: 476 - DNA, 20001 bp, Homo sapiens
ccagctgaaagaaactcaaaagctttttagcaatgtctttttttctgaaaagggagtaagctaagggatgatgtagagataacagtgcagaaccaaactattaacaagaaagccattgtgggagtaaatataatggctgagaaactcgggataagggcatctcccacagcctaaacaagcccattgctaattatgtctgtgtccccaacccctcatgagtatatagaagtgtgcttgtaaattgttgttagttgctttccggcaagagactaatttattggaaaccccttctggaacaagttttacgtagtaccttttccccttctttcttctgctttaggtattctagacagaccttgaaacctctgaggagtgtttgaatcctacttatttctccctcccctggaacagatgctggcctaggtctatataaatccaggatgtatataagctcacaaagatctaaacataatcatggagttcacagttatcctagagcttaaaaatgtagtcagagggctgtacccctgaaaattctgaaagactgatattttctgtaggtttatttttatttttattttatttatttatttatttttgagacacagttttattcttgtcagtggcgctatctcgactcactgcaaagtctgccgcctgggttcaagcgattgtcctgcctcagcctcccaagtatcagggattacaggtgcccaacaccactcccggctaatgtttgtatttttagtagagacagggtttcaccactttggccaggcttgtctccatctcctgacctcaagtgatctgcccaccctggcctcccaaagtgctgggattacaggcttgagccaccgcgccaggcctgttgtactttttaatacactagccttctgggaaaattttattttaaaagtcttgtatcttgtaaaaatgaggatttcattgaatgtctttaagtccaaacatctggagcttctctggctggagaaatgaatgggagaggtaacattcaccagctcgttcattcaacacgtttgtttccatgggagacaacatgtaagagcatggatttctttgaaatctcacaaggctgcatcccaatttcatatcaccctggcaagtaccatccctgatctctgagactcagattttacttgtagtgatagcattatctcacaataatcctttcctttttatattattattatccacttttatgtatagaaaaaaataaggttcaaaagaaaccactcagtgatggttttagggaggaagttagaattgagttctgtcttgactgataaatagaataaaaagaaaaggcttgccagaactgcacattatgagccagagcccaaagataaaagccaagaaagtatgttggggccgttagaccacccttgctggcacagagagctcgtctagaagaggagatctcagcatttaatatgtatgagaattatttggagagagtaaatttcatttttaataagtacccatttgttttattgttgtgtacatgacctaagaagcataccttaagaaagaatagtgataataacaggaaataagaatggaatatagatgatggaactcttgaatatcagactaaggagtttggactcaatcccaaagatgaagtgaaatctactaaatatttctgaacaggagagtgacatatgccaggcatttatttttaaacatggcaactcctgtgcggtacctctatttttcagagatgatatggtctgaaactttctgagcacaaagaaaagagctgaagttagtattttctcagactcatggtcaaatctagcttctctaaatctctggttaccttaaaacgtgtttacaaagtgcctaaaaccgaattaaaaattgaatagatcttgatgctgtgaacacttggagacaggagacataattaaaatgttacttttcaagtaactatttcctcataattttgcatttctttttctttaattttttcttttttttttttttcagtagagatggggtttcatcatgttggccaggctggtctcgaactcctgacctcaggtgatccacccgcctcggcctcccaaagtgcagggattacaggcatgagccaccacgcccggtttttttttttttttttttttttttcaagaaacagagtctcattctgtcattctgtcgcccaggctggagtgcaatagcacgcaatcacagcgcactgtaaccttgaactcctgggctcaagggattctcccatctcagctttctgggtagttgggactacaggcatgtgccataatgtctctctgggtttggttttgtttcgttttgttttggtagagatggggtctctcttgcccagactgttcccaaactccggcctcaagtgacttttccacttcaacctctcgaagtgctgggattacaggcatgagtcatcgcatctggtccacatttcttctttttctttttattttttctaatttgaagaggtctttatcaagcacagacagtgacagtctttttgatttatcttgtggatatagacattatgttcagagcttgaaattcacacccaagaaaaatgtcaggcatgattaaaagcaataatagtctccacaagccactcatgaataccaatcttatgacttaaagaatccctttataaaatgctatgaaaaatacatatgaggaaaaatatttattatatgtttcttgaccactcaaagaaacacaatatataatactacaatattgtacttctttattcatgaaatttaaaagtgatggtgcttcaattctgacagaaaagcctaaacatacatggtaactgagttactcatatcacatttaagtcattttaaccctagttagagcacgtaaagcccccactgatctcttctatatgaggctcttggttaatttggacctcactcctcatttcttgatttagtttctttccataataagtcccagaacaatgctgctgggtcatgtgccttgatgttaaattgatgatcaccataggtcaaaagcccgtcgaagaaagcaagcaaattttgctgatgaagtcacataagttgatgaaatccataaagccagctgttcttctagtcaagtcaaccaaaatttccttcagagtgaccctcaatttttttatcctatggtattgctggcagcccaagttttgtgctttggtgtgtgtttataaagcttcctgtgtgaatttaaggaaaattttggagaaatgaacttaataaggtattgattatgtggatgaagtctatatggtttcataagaaaattcttgactgaaatgaaaatctttgttccttcattacttgtttttatgtcctcatatttgcctgttagtatcaagatttcatatctttcttttttcgaccttcccacaaaccagtaaaaactgctttgctacacaagaaagaaaaagggaccaagagtaaagccagatgcacaaacattgagcacacactcatgagctgtctttggtcttatctctacagaatatacttttctaaatgtttcaaagactgcataatagcatcccacacatacatcgatgttcaatatttgaggatgatgtttccatcacagctaggagagtgacaggcagaactttcaacagtagtttgtccaatccaaaattgatataaattgtacaatttgtaaagatattttggaagaatgcccagtggactagtgagatttcactccacttaactcttaacctcaactctctttacctgtagaatttaatgtagtgtcagtttgaaaatggaatggaattcttattttctttcagaaagagaaatattgtgactcttaaacccacctaattttagaaatataaagttattcagcctacagggagactagaagagtccagagatggatcatacggtatttcctgcctttttttcttcagaataatttaaacttgtggatattgcacctggaaatgcttttcccactaagcagtctgaaaagaccatgaagttggtattaccaatttgctggcggactctgaactgaagtggcatttcacacataatgtaacagtctttccttaattcaaaacctccaagcagggttggcaataggccaacacatctgctacatatccctgtgtatatcatcaccatctaaatagagatgcattttgaaacttcaacattttagaataattttttcttcatttcttctttagagaatttaaaattatttctttgttattttatttccagattgtcagactgtagcctttgcacaatttgatatttttaataatcattaataaaatatctagataaaacatctatattgctgtgctttgtttcatgcactatgagatgctgagaatgttatgaaaagatttatttttaaaatgctatatcagaatgaaaatatcctttgaagtctaaagtaaattgttttgattttcttttcacaacagattttcttcatgctacatgaattccagagactatcttttctttcttgtgctcaacaaattatttttatgtgcctctaaagttttgaagtggatcttttaacaatatgtttagatcccctccttcaaatcaataggaaaaagacagacaactcattagaaaaatgggcaaaagacctgaacagacatttcacaaaagaggatttccaaatgtccaataaccataaacataaaaatgtgcttacattagccatcaggaaaaaaacgtgaattaaaactatagtgaaataccagttgatatggtttggctctgtgtccccacccaaatctcatcttgcagctcccataattcccacatgttatgggaggcacctggtgggagatgattgaattatgggggcaggtctttcccgtgctgttcccatgatagtgaatgggtctcatgagatctgatggttttaaaaatgggggtttccctgcataagtctctctctcttgcctactgccatgtaagaagtgcctttcaccttccaccatgatcatgaggcctccccagccactgagagtccaataaatgtatttcttttataaattgcacagtcttggatatgtctttatcagcagcatgaaaacagactaatacaccagtgtacaactcattagtatggctaaaatggacaagacagacaatacaagtattgcaatcatgtggagcaaacaggaccttcatattgctgatgggaaagtaaataggtacagccactttataaagcagtctggctgttttctaaagctggatatgtgcattccctataactcaacaagatcctagctgggcatgtgccgcctaacaaaaataccttcatgtgttcaccaaaatacaggtaacaaaatgttcttaaaagtactatttgtagtggccaggcatggtggctcacgcctgtaatcccagcactttaggaggccgaggcgggcagatcatgaggtcaggagatcgagactatcctggctaacgcggtgaaaaccccgtcctctactaaaaatacaaaaaaattagccgggcatggtgatgggcgcctgtagtcccagctgcttgggaggctgagacaggagaagggcatgaacccaggaggcggagcttgcagtgagccaagatcccgccactgcaccccagcctgggcaacagagcgagactctgtctcaaaaaacaaaacaaaaaacaaacaaacaaaaaaacccaaacaaacaaaaaaacccaaacaaacaaaaaggtactatttgtagtagtcaaaaactggaagttaaccaactgttttcaatagtagaatgaataagttataaacaatgggattctaccagcaatggaatgaatagtcttcaactacatgcgatatggatgaacctcacaaaacagtgaacactatgattccatttaaataaagcataagatttggcaaaatagtctatgatactggaaggcatgagtaaagtggaacacaaggtagtttgtggggttccagtaatgtactgtttcttgttctaggtgctgcttcaactacctgtacacctaagatttatttgtacgtttctgtgagtatattcttgtatttgtctgttcttgctttgttataaagaaatgcccaaggctgggtaatgtataagaaaagaggtttaattagttcactcttctgcaggctgtacaggaagcatagtggcatctgcttctggagaagcctcagcaggcttacaatcatgacagaagtccaagcaggagcagtcacctcacatgatgaaagcagcggggagaggtgggggatgaagggaggtaccacatacttttaaatgactagatctcacaagaactcactgacaagaaggcagcataaagcaatgagggattggctcctataattcaacatgcaatttgggtatggacaaatatttaaactatatcaattgtatttcaataatttgtaagtgctcagactactattcccatcaagtcttgttctaggaatttaaccatcaacttaggaaaatgggctttagacacagaatacactcctaacaaggacacttgtacaaatctcttttttcttgttggaactctccacgttcttcaatgcctgctttaagttttcgacttctttgtgaacttaggaacttctggaccatgccagccaaatgagctgctctcccttctccaaactcaggtcttacttttaatcagtacagtttgttcaatccttagtaaattctacacaagctatcttcccaattagatgctaagctttctgagagcagaaaggaccaaggtactttcctacttctgagtaaccattccccttccccatcacacctggcatggtgctttgtagtaaaaataaaatatttattagtgctcaataaatacatggatgattggtgaatcacaatgaaggcctctattaatgttgggtggttaaggaggagagctataaactcaataataaagaagggatgtaaagagataattagaatcagcccccaccgcttttaaaaaggtgaatgtttaaacttgggaggaccaagaatgcagtttattcattttaattacatcatttcagagaattcagttcttcccataggcaaagaagagcatatcctgtggcaaggccttgagaggttcttgggaatgtgtagggcatagaatgcagcccacaatccctaccgcccagtctgcgggtggcagagatgaagggagtggcttcacatggagtgtgttcatccatggcaaatggattatagcctttctttctaagccactctagccagattatttactgaagtatagtccttaagaagattaaggctaaattatcaagtaaagcatgtattcaggaattaaagtctggttgaagttactcgcttgcaaactctggacattatgattaggggaagcagaggcaggaaacaagattggaatcacagaatccctttaacaggtaaatttccaaagaggaacttcagggaaacaaacaagatcaagtgtttagcatccagggcaattaatacatggtggaagcatcacatcaagttccaactctgaaatcaaatcaagcttgacaagtagagatggaggaggaggaaagatgcagtgggaagtttggaaagggtacaacatgagggcaggtcaacagatctctgggccttaaacacgaggatcttcctgttctgcctgatcacagctccagctcacttgctctgtttctttcaagctccctacatttctttacaattaaaagccatcaattcatgtgtatcatatgaacccaaccactgtgcgaaatctaaaagaatagagagaattttttttctagtttccttggctaaggaacataattctttcaccttcctgtgttaaaagaaagagcgaattaatttcaacatgattttgcacctatttcctcactgaacaagctgataaaagaacctcatgtgtgttgtttttttctttcatgggtgtttcattgattaaaattcacctcctattccactaaaattaaacccaggtctccgtacaatctttctcatttgcagttttgcaaacatcccacagtgaactacttagtgagtacaaatggaaagctggaagagagggggtgtgggtttataaagtgtctcctggactttagcctcaggctacaataaaatgttaatgaaatgcattaaaaaaacagggaaataataattaaccatctagaacaccactgattcatttaaaaaattctccccctcccctgtcattacacctgtacagggagaacaggtcacattgaggccatctggcagcactgcctgagggttatggtccaggcaaaccagggagagcaaagaactccagagggagcatggatcatcttctgcttgaggtcaaatttggggaagttataggaaacatattgcactgaaccctgtcttcaaatccacgtttaaatgcctcctgaatacttctcattttcattttgaagatgctacagcaatagagactctactgaagatgtggtgtagaggatttactccttggtaatcttccaaaataatggatgctagttcatgattattctattttttccataaatgtgcatttctatgtttattccctatctgtcaccacactggatgcaatcagatttgtcatcttttgagaaaatgatttttgaaatagttttatgtgaggtcaaggaatgaaatgaattatttttgtagtggagatgagaagagtaggatgttctctcaaaggcacccgtaccctggtctgtcacattcacgggccttaaattccacagaaatcttcatacagcagagcaacatttgttttctgaaccacaggagaagaaattctaaaaataaaaacctgtctccagggacgcaaagtactggtaaagcaacacggcaacatgcataatgcaaaaaaaacaggtcaaatttagtgatggatgaacatcaaacgatttctagctctgtttcaatttagatacttattcaaagcatgtcgaaatgatagaaacctcgtgggtctacataattgagctaaaaaaactttcttgagcatttttcctcacagcattccctctctgtctctctttctttttctacccctctgttatttctttttcctttccccctctttgcttctttgcataaaatctggaatgtgaaagttaagaactacacaaatatagaaacaagcattgtgaaatttatacatatggttctgttggttagactaacatggaattctgtttttgttcagtccactttttcctactcaattgtattaaacctgcttctctttgtgctgtgcaggatgaggtgtttacctgacaaaaaatcccaattgtcttcaaagaatactttatggataacaaaaaaatataatgccaccatcttggaaatagaggtaacttcctttcaaatttttcaagttatttgtttttccaatacttcaataatgtatacagggatacatagtttcatccctgataagagtaatgtaaaggacaggaaactgagaatcaacaggcctcctcgagattccagttttgccacttaatctcttatgagtaaagttttcttgtcaataaatttggaagaatattaaccatcaatgcccttaaaatacaataaaaaggactagttatacctgacggtactgaagaaggctgccacgtcaagtctaagtataaagagaaatgacaaaacagagaggctcaaggatttgccccagaatcatagtcactgtgaagatctagacaaaagtcacaaaaattttggagttctaatcctgtggtcgcgcccaactcctcatgtcaatattctgaaatgtgtcatataaaattcttacgcaataacacttcacttacaaaaaaccctgcttattagcaacagattcagaaggaaggacggtaaagggaaaacaaaagacagcctctgaacaatctaaaacaaggactcaaatttcatgcactttttccagtttgaaccgctgaagccttccctaagactgtttacttttccttatatagaaatttaacaacactaataatattgttgccaacccataataagttagaaaaaaagaaagggcccactagacaaagacaacttataaaagacatttattgatgtgtgggacaaagtcgaggttctattgatgtgtggggcaaagctgaggttcggatataccttgtataaatgtaagtgatcttatcactggtttttagcagaatcccaagattttcattgtctaaaaatatgtcatgagaacgaggtctcagtacataattggagataggatatatgcagtcatgttagagcagagaggtgtggccacagatttcaagttatatagggctcttgaataaaaaattgccatgattttagaaagaggttcagacacagaacattctgttcataagaagcagttgttctggggtagaacatgaaggctgcactcacattcccccatccatccctgaaatgttataaattcaggagccctagcaactctgctgtagaaatacctactcaatccaaacaagagatggatactagccaaaaagagaaagttaagaccctgagacccagtctcatgtatctgcaaggaacgtaaagcagttaatagtggaaagagcatcccaaggagatttgaagtcacagatggatgagcttcaccacatcaaagtcgctaaggaaaatgcaagaccacagaggaactgatgctccgttacctccctaatctcatctcctactggtgtctcttagtctggcctacctaacttccttgcaattcttaaacaacgccctgtccctgtagggtctttacactgtacggttcgtctgcctcaggtatccacatgaataactcgctcatttcctctaagtctcatttcaggtatcgctttgtcaatgagtattactataagcattgtgtttcagattgcaacctccctccccaacatccctgattcctattacccttctgaatgtttttcatagcacataatgctttctataggcaatgtattatgtattatgtttcttattacttatgacagttatattattgtctgcttccccccagtgctccaggagagcaggaacttttgtctgttttgtttactgctgcagcctaaggccatagaagaatgtgtggcaaatagtaggtgttcaataaatattgattattttgatggtaaaataaatcagcagaactgtggaggaagcacaggcaatgagtatatccatagtaggcaacagacatgatagacagtgggaagagctgcagctgagggatgatagaagctggaaggggtatgaatgatgtgtaggacaatcctcccagaaaggaaagagccgagattctgtcacttgacaagtggggctacggattcagcagacttagatacaaatgtttaggatgaccttatttaagatctactgatctgtgggacccaggagatgttcaggttacaggtgaaaatatcccgatgcatctcaaaaatgtcagaggtcattgcctcctataaatggactttcaaagaacatgttcctgatgctaccttgagacatcaaaaaagatttatcatgcttaatatgctttgggaaatctatgaaatctctaggactatttccatcaaaggtatttaaaatataaagacagtaaggctaggtttccattatctgggaacctgtcttctgtaaacaacctcaaccctagacaatggagcagtggcaatgcaaaaccacaggcttgattctctgtcccagtcacaccagggatgttgtctcttgatttgaggtaaacaggaggatggggtcagagctgaacatcagcacaagaaacggatcccgtgattaatcacattaaggtcagggagatctagaacaaagttcccagaaaagaagatacacttaacaatcagtgggtggacccaggaagcatgaaacaaagataaaagctcaactctaaaatattgttaggaaactgtaatgctaaggacaaaaagaactttacatataaacattgtattcttataacttctaatggcctaagctgtaacaatttgagcaacacagtaaataatgatagaactggctaataagccaaagcatagaacaatatctataagtttgtactaatagaagtcattgattaaataaatgaggacaaatattttttattaaagaattccaaataataaatgtagaaggaattaggaaaatagaaaatcaccataagaacgccacagtaataattgctgcaggcaagatccatgaatgaatgctaaaattagtgactaaaacttttaggggaaaaatgatgtttgaatagactcaatacatctcccacaaaatatatactaaacactcatcattttaacacatgtccacaaattctttggtactccaggagaaggaatttgatatctctccccttgaatgtgggctgaacttagtgacttgcttcctaagagtatggaaaggggaaaaaaataagaaatcaggaaaaactctatttaacaaagtgataatcaccagttaacatcaccagtgataagccatgctgctatcctgtattccctgatatgaaaagagcacttcattcccgtggtcttcttccccaaaatacattacggtagtccaatcatgagaacatatcaaaccaactcaaattgagggtgttttacagaaaactcttcaaaagtatcaaggtcatgaaaagcaaggaaagactgaggagctgtcacagataagaagaaattaagaagacatgcgtaccaaatgcaatgcaatttcctgggttggatcctgaacagaaaaaggacattagtggaaaaactggcaaaatccaaataaggtccatagtttccttaacagccttgcatcaatgctagatttttagttttgataaatgagtcatagttatataagataataacattaggggaagccaggtgaagggtgtgtaggaactttctatgctacttgaaacctttctgtaaatctaaaataattccaaaattttatatatatatatgtatttacctataaattttataaaattttagaatgatattatatataaaaagtttattacatacaaaataggattaaaataactaccaggataaaaaataaaaataatatatgtaggaaaaaatacacagattcaactttaacataaaactgaaattgagaaaactcagatgattctcaggcctttggcttcttgttgccaataccattgtcttcaacaaaggcaggaacaagttaagaagagggtcattggcctactgaatttttatatgaatacaaaattgagaggagtcaacatctaattgatctaaaactagaatgttctgttacccagctcattgcaattgagtatttgtcacttaaaagaatggaaattaaaaaaataattttaaaaaaccatgattttctcatccacttctaaagatttggggaagcttaaacaagattatgtaaatcaaaggacttggcaaaatatacagaaggtggtcctacagggtcctctgcatcttctaaagagatgaaattataaactacatactttggaaagttaatgtattctagcagctggcatgctatgggattataagaaaggttcccataataagaatatgtaattaacataataagaatatgtaattaaatacaaacccttcctcctccattatatctgaaaactgaaagctttctatagtggactttaagtagactggaaggatacagagttacaagtaaattcacttcatttctcgggatatcattatctcaatacacagctaacaaaatgaaaacactcttgattgtctcacctgtaaaataaagaaatatgtagataatctcccaaagcctttccagtttaaaagctttttatgatacctatagtcttccaagaagagagaactcaagttaatgctttgcatgattacagttggggcattgggaaataaatccatgctatctgtaaggttgctgtagatttcaatgcatgtcacatgaaaaaaagtacagcctttatagtgaacatccttactatgaacacaccctgaggagattctggacccagtaatctctctaattgcaaattgcagtttcctgcctaggttctttgtgttccattatccacaccgctcaatctctaaccaccagtaatccaaccaaccaatgaaccataataaaaaatggcactacatttattcctgtctcagacattacagtgtatggcaatttatgttttctttacattaaggcctctgaatcaaggtgaaaataaacctcattaattgttttcaggcatatagatttgcctgacttcaagtaggcaaaataaaagaaataaagtatttttttccaactttgaccaattcataggaaaggaacttataaatctagtccaaataaatctgttacatatcagtccagaataattacccaagcccagctcaaactcagttcaattgaccatctagggccaatgtttttatctctgtgatgtttacataaatctcataataatcatcattcagggtttggcttgagggctgctgagagaataatactatttttttaatttttttttttgttgttgttgtggggagggcgatggagtattgctttgtcacccaggctgaattcaaacttctgggctccagcaatcctcttgactcagtcccccaagtaaattggaactaaagacctggatcaccactcctagcttgaaaaataactttcaaaggcacaaacttcatgttaaaccccacctttaccagcctgctaaaaagaaacttcagcatatattactaaatattgccttctctgtgaattgagagttacttaagatgtgaaaaagtctttatatacccccttctatttcagaggtgtgttgccctgaaacagccacagctactaacacatcttggcatcatataattaagagtgcttggtgtgatgtcaccaatctgccaacccaaaggagtgttttaatttatgcaaattaacaaatttgagtagacatattcctaatctaagttacatgtattttgggatttgaagttttcagatttgggagggataataaggctcatatgaagagtaccaaatagtatctccagcgaagtctgcagaagcacccaataaaacatgattatgactaccgtaaaacacatggatatttgtaatcggtgggataaataaaggttattactgacccccatcaattcaggacaagtttttccctcaaataaattatttttaaaaagtcactttcaagaacttcttggattttggagttgaggttaatgaattgtggacctgtaattgtgtgaaccagtaattatgtgtgaaccagtaagtgagtgtaagaaggatacattgaaaaaaaatcattttattttaatgtcctcttttctagtaaagaaatcgtttctccacttcaaagagttaaaataatcttttgagagttgatcctaattgagacctcagcacctcaccttcaaaaggatccatgtaagtagatcagcacgtgtatgtgcttccaatgtagactctatggtaatttattgcttccaaattccatccagtttcttttataatgttcacagattcagaagacagttctgctcacatctaaaatagcggcccacctgtttccatttatccccctttcatattaaggacaacgtaaccccaaacctttatcttcaacctttaaacatttcacacaggcccatttgggaaatttattgttgccttaaagagacttgtctttttcattcagtgtatcccactacaaaaatcaactcagtacctgttaaccatctggtctctgtatatatcaggccaaaatttccagattttcttcttggagttttctctgtagaagatgaatcctattaggtgaaaaataatgctggaagaattgcaagccattattctgagcacaaatgacactttccttaataagtgttcccagtctaaatcagctttgaacttcagatctgcctggattctggggtttgttttcaatagtcatagccaacatgatgacatctttggcagagacttacattttttaatcagcaaaactgtagtgtatgaaacaaattcaaatgctccttccttttccatgtcagaaatttccggaaacctaacttagcgattctagaacagagagaacaaaattaaatcaggctttattgtttcataacagccagtgtctaccagtaatttgaaatctaacaggattttgtaacaataaatagggaaagatttactttttgagaatgcataggatgatataatagtgatagcaaacaatggtgagcactcaataatctgagcaaaccattttaacagtttatgaatgattgtcttttcctccaggtcaatgtttctcaagtctgtcttcacattagaatcacctgagaaccttttttaaaatgccaatgctccactacatagcagaaattaaaacagaaactctaaaaaatgggtttcaaacgtctttattttaaaagcactctagatgatttaaatgtgcagccaggtttgataacaactgctatgagctattcattcacttattcaatcattcaacaaatatatgttgcgtaccaactatgtcctagtccttttctaggtaccaaggattcagaacaaacattcagagtgtctggaaaatagttattaaagttcacaggtgatattggatgggccacaagggccatgtcatgcaaaacattgaagaatttctggttttattctaagtgaaatggaaagccatcaaggggaagggggtttagcaaaggaatgacatgatttgatttatattttaaaaagaacattttggctgttccttggagatttagatcaagtccaaggacagaacaaaccacaagtttggggagcaagacaatagaagattttgggaacttgcttttatgattacctttgtcttagaccaacaaagtgatgtgcatgttgttttacaaagtcatcattcctctgggccgcatttggatgaattactctttcaccaacccacttagtgaccaactatggtttgaaggagactgcatatgacttcctttgctactagagagaactcactttcagagttcagtacatgtttctcagcttgatgatgcatggcggagtgcttcccacactaggcatttgcttagtaataggaggataaaaagaatctaggaaatgactctttccagctgagacacatatataccatgtagaaatgctaactctgctataggctgccaaacaggtgctcatgtctacaaccagggaaaaagctatagtctctaactaagatcctatttgggtgataactaaaataagatcctatgtgtttatcataaattgtaaagcaagcattttccctgcagtgggtttatatgtgagtcatagtacaaataaaataagccaatggttgatgaactaaataactcaatatgtgttgtgttgtaaccagaccgcaactgagagtcagtagcagcaactagggaggaggaaaaaagctggaactgcaaatcctaacaacacacaacccactctgttagcatcttttatttaccattgcacaaatttttttcttcagttcagactattctgaaatgtgatgcaaactaatactgataccaaggccaagaacgatgaaagagtctaagatgttcctgcataaatgggcagaaaccaagtagtgcagcatttcggttgggttttctccattttaatcaatcaatttattaattttagccaggaattgtaaaacagaatttttataagatgatattgaaatacatgcacaaaagtaattttaccattttgaatcagaaacacaatagctgataaacgctctcattgaaattgttgtttttataatgatacttttgagggtacacgttttcttaggaagcaaccgattttatcttaaagcagaataaaaagaaagtgaaaaaattatttgagattaggcaaactgctgcaaacgtcgatttaagcatactcactcttgaaaattcatacatttccaatctactgacagatagtaatgactttggttagtaatttacttatatttaaaacagtaatcccatttgataatacaaatgaatcagtcattcaacaaagaatcaccgggcgccagtgctaggcactgggacgtacaatgagtaagatagatagtgtttctgtttatccaaagcttgttgggctgggtgtctgcctcattttctgtcccctcactatgtttcatagcatttgtcattactcaattttgtgcatttatttattgttattttcctctgttagccttggagaggaatcaacttatttaatgctcttccatcagctctcagtcagtgcctgactcataattagcttttcttaaatatctgctgaataaatcagtgaatgaataaacccaagatcatatgacttataagttacagaactcaaaccaagcccagatctctctgacagcagaggtcacattcttcattatacactcccctaatcttcatggcttcttaaattatgataccttcaaatgagaaacagcatatatgttctataggatgggtgcccattcaatagaatggtacaaccagtagaatcaagttttcaaattacttttaatgatgctaaaaattgctgataacataattttgagcaggaagaaaagtaggataccaacttgcatacacaacatgagaaacattactgaaagaagatgccaaaacaaagctgagaggaagatgattaaaatgtttaaaataattaactctggatgattggattgtgataacttttgccttcttctttttaccttttcctattttctaaatgttctattaaaaacatgtaactacttatataactataaaaaaatttaatacctaagtgtaatttttagtggaatagaagaggaaaaaaaacctcactaggcaagactttcagtatcaaagaaacagaggaaacgattttcagaaaattaattcagctagccctaaggcactgtgggaggtagacactctccagatgtacttttgaagctaaattatagaaaatctctcatgctgactgagttcagaattcatctcaaagtaatagggagccattgagggtggttgagatgatggggaaatgttgtcaaatgctcaaagcctaagtaattgtgagaaaagtggcaaaacaagaacactaatcaaccaccatgctaatgattcctcctcattgataggtcttcggatttaacattccatatccagatgtcatagatccacacaagcatagatttacttgccaaaagctgtgttttgctcgaaattttttgccactgcaaatatgtcagtgtcccctctgaaacacctatcaaaagagtctgaccttaaaaatataacaaatgaaaaaccttttctcaaaatgtagagttcaactaggcattagttttctgtttctagtatttctatttgtttcttctaatatgaaattcatgatagaggattggcatataatgtaagagtatctttattattcatttgaatttcttttgtaaaaattctgttttgtgaggttttcatgccaggtattttccattttactttctttttccctttggtatgaaataaaatttttctagcactacatctggaagccagtcagccaagggaatcaaaggggacaaaaggaatagacatgttcccattaatatacatacttacgagattagtagagtgattggtcaaacatttatcttttattttctgcagagatagacatctgtagaaatttttaaaagttaagcatataatagaacccttttctaagcagggattcaaaagcctcatgaaattttctacgttttttaactctgaaaaggaaatacttaatatgtgcaccaatgtatgtaaaaatcatgtgtccaccatttctaccat

SEQ ID NO: 477 - DNA, 40001 bp, Homo sapiens
tattgttaaaatgtcagctgtcctccagattgtttcatacattcaatgcaattccagtcaaaatcccagagggcttgtagacactgacaagctgattctaaagttcacagaaaaaacgtgtagaaaaaccaaagcaattttgaaaaagaatgaagctggaagactcatattacttaactgacttaccatcatgctatagtaaacaatacagtattgtggctgtgtaaggatggccagacagagacaaatgtaaaatctaaaactatgaaacttccagtggaaaagacaggcaaaaatcttagtgccgttgggtcttgcatggacttcgcagataggatataaaaagcacaaaccaggaaaaaataataataataagctgaggtttgtcaaaagtaaaatgtgggccaggtgccgtggctcacacctgtaatcccagcactttgggaggccaaggggggggcggatcacaaggtcaggagatcgagaccatcctggctaacatggtgaaaccacgtctctaccaaaactacaaaaaattagctgggcgtgatggcgggcgcctgtagtcccagctactcaggaggctgaggcagaagaatggcgtgaacccaggaggtggagcttgcagtgagccaagatggtgccactgcactccagcctgggcaacagagcaagactccgactcaaaaaaagaaaaaaaaagtcaattctgggccaggcgtggtggctcacacctgtaatctcagcacgttgggaggccgaggcgggcggatcacaaggtcaggagttcaagaccagcctgaccaacatggtgaaacccagtctctactaaaaatacaaaacttagccaggcatggtggcgggcgcctataatcccagctacacgggaggctaaggcaggagaatggtgggaacccaggaagcggaggttacagtgagccgagatcacgccactgcactccagcctgggcgacagagcgagactctggctcaacaacaacaaaaaaagtaaggctgggggcggtggttcacgcctataatcccatcactttgggtggccaaggcgggcggatcacttcagaccaggacttcgagaccagcctggccaacaggatgagaccccatctcgactaaaaatacaaaaaattagccgggcatggtagcatgcacctgtaatcccagctacttgagaggctgaggtgggagaacatgggaggtggaggttgcagtgagctgagatcgtgccactgcactccagcctggcaacagagcgagactccatctcaaaaaaaaaaaaaagtaaaaatctgttcttcaaagatattgtttaaaaagatgaaaagacaagctatggactggtggaaatatttgtaaaacacatatctgacaaagatcttgtatccagaatgtatagagaactctgataactcaataaatagaaagtaaataatgcaacttaaaacaatttaaacactttatcaaagaagagatatggatggcaaattaagcacatgacaaaatgctcaacatcattaatcttcagagaaatgcaaattaaaaccatgaaataccactacacaccaaataagaattggctgaaaatactgaccacgggccgggcacggtggctcacgcctgtaatcccagcactttgggaggccgaggcgggcggatcacatggtcaagagattgagaccatcctggccaacatggtgaaaccccgtctctactaaagatacaaaaaaattagccgggcatggtggcacgtgcctgtagtcccagctactcaggaggctgaggcaagagaatggcttgaacccgggaggcggaggttgcagtgagctgagattgcgccactgcaaatccagcctggcgacagggcaagacgctgtctcaaaaaaaaaaaaaaaaaaaaagactgaccacctacaagtggccaaaagggaagtggaaaacctggaactctcgtactgtgctgtgggactgcaaaatggacaagcacatgggaaacaatgcggcagtttctcagcaagttaaacagacactggccacgtggcccagcaattccattcatagttacttagctaagagaaaaatgtatgtccctacaaagactgcacacttatgtttatattagctttatttcttacaaaaacaggaagcagtataaatgtccatccactggttgtaaactaacaagccatggtgcatccaaaccacagaacactacccggtaacagaaaggagcaaactgctcatccatgcaacaaggtgcgtgccagggaaagaagccaggcgcagaagatgatggcagacaccctgtgaccctgtgtcacgacacgctggaagcagcagaaggcaaagaaaccagatcagtggctgccaggagccgggactcagggggacctttcagggtgacgaacatgttctacatcttgactgcactggtgagtacatttcccaaaactcatggaactgaaccccaaaaaaggtgaattttactacaagtaaatgatactgccatgaaaccggatattaaaaatcttatttgtgcaaacattctgtactattggaagtactgtatccaaggcaagtatcacctgtggtcaagctcttcccattccattgagcgttaactgccaggacagtctccttcaagccccaaaaccagtgcaagtcacggtgtcgccagagccagtttgtaacagaggcgtctccatgccagaacatcaggtttttttttttttctttgagacaaggccttgcgctgttaccccagctgtggtgcagtggagcaatcacagctcactgcagccttgaactcccaggctcatgtgatcctcccacttcagcctcctgagtagctgagactaccaatatgcaccaccacgctcagctaattttttaagtttttgtagatacagggtctatgttgccctagctggtctcaaactcatagggtcaagagatcctcctgttttggcctcccaaactgctgggattacaggcatgagccaccgtgcctggcctgaatatcagcattctaatctggaaccgagatgctttgtgctaaagttctattcacagcatttgctgcgcttgacgcttggtgggttaaatctttcaagcagttgatgtacatttctgccactctcttagaataaagagctcttggctgggcgcggtggatcacacctgtaatcccagcacattgggaggccgaggcgggaggatcacctgaggtcaggacttagagactagcctagccaacatgatgaaaccctgtctctacaaaatacaaaaattagccaagcatggtggtgagtgcctgtaatcccagctactctggatgctgaggaaggagaatcacttgaacctgggaggcggaggttgcagtgagccgagatcacatcattgcactccagcctgagaaataggagtgaaactccgtctcaaaaaaaaaaaaaaaaagactgggcgcagtggctcacgcctctaatcccagcactttgggaggccgaggcgggtggatcatgaggtcaggagatcaagaccatcctggctaacatggtgaaaccctgtctctactaaaaatacaaaaaaaattagccgggcatggtggcgggtgcctgtagtcccagctacttgggaggttgaggcaggagaatggtgtgaacccaagaggcagagcttgcagtgagccgagatcgtgccactgcactccagactggataaagagctctttgggaaaacaaggttgttgcaccccttcctacacgttacctaggctttcccttttcccccaaataatgccttataaatggcaggcacatcattgctttaaaataatcaagttctgtctgggcgaggtggctcatggctgtaatcccaacgctttgggaggccaaggcaggtggatcatttgatttgaggccaggagttcaagaccagcctgaccaacatggtaaaacctcatctctactaaaaataccaaaaaactagccaggtgtggtggcacacgcctgaaatctcagctagtctggaggctcaggcaggagaatcactttaacctggaagatgcaggttgtagtgagtgaagatcgcaccactgcactccagcctgggtgacagagtaagactccgtctcaaaaaataaatatatcaggccgggcacagtggctcacgcctgtaatcccagcactttgggaagccgaggcgggtggatcacctgaggtcaggagttcaagaccagcctgacgaacatggagaaaccccgtctctactaaaaatacaaaaagtagctgagcgtggtagcacatacttgtaatcccagctactcgggaggctgaggcaggagaattgcttgaacccgggaggttggaggttgagccaagaaggcaccactgcactacagcctgggcaataagagcaaaactccgtctcaaaaaaaaaaatacatatatatatataaaataaataaataaaataatcaagttctacaactgttaggaactgaatgtttgtaactgagtgtctgtacccccctaaaattcatatatttaagtcctaatccccaatgtgactgtatttggaaatggggcctgtgagctgataaatgttaaatgaggtcactaggtgggaatcagatgtcacagggctggtgccctcttaagaggaggcagagagagcaagcagagtccccctctctgccatgtgaggacacagcaagaaagtggccacctgcaagccaagagagccctcaccaggaacccaatctgccaacaccttgatcttggacttcccagcctcctgaaccatgaaaataaatttctggccaggcacagtggctcacacctgtaatcctagcactttgagaggccgaggcagacagattgctggagctcaggagttcgagaccagcctgggcaacacagtgaaaccccatctctactaaaatagaaaaaaataagccaggtgtggtggtacgtgcctgtagtcccagctactcgggaggctgaggcaggagaatcgcttgaacctggaagagggaagttgcagtgagccgagatcatgccactgcactccagcctgggtgacagagcaggactctatctcaaaaattaaaaaaataaaataaaataaaaaataaatttctggccgggcgcgatagctcacgcctgtaatcccagcactttgggaggctgaggcaggcagatcacgaggtcaggagattgagaccatcctggctaacatggtgaaaccccgtctctactaaaaatacaaaataccactgccaggcgtggtggtgggcgcctgtagtcccagctactcgggaggctgaggcagaagaatggcaagaacccgggaggtggagcttgcagtgggccgagatcgcgccactgcactccagcctgggtgatagagtgagactctgtctcaaaaaatatataaataaataaataaataaataaataaataaataaatttctgttgcttaagccacccagaatgtagtattttgctatggtagtatgaacaaactaatacaataatcttaaagtttttgctggcaacattatttataaattcactaaaatcgttcctattaaaagataaactcaacgacatattttctctccttgtcttaacatgtaatgtcctaccatgtaataacatgtataacatgttacaataacaatggctaatgctaagtgctaacgctaaagttccttctaagcagtccgtgtatgatctcattaactcctcagagcaaatctatgaagtaggtacataggcgcagaaagatgtcgttagcccagagtaatgtgttgacagattggaaacccacataatttgtctctagggcctctgctcttcaccaaacctcctagtctatcaagtaaagacaaagggaaaaatcttcaaatacttcctcttgtcttaaagggataattttgatatgttatgatgatatctaaatactttcaaagttgtaaaataaactttgacttgatactggaatgtaagactaccaaaacaccccaaaaaacaaaaccaggtcagacacagtggttcacacctgtaatcccagcactttcggaggccgaagcaggtgaatcactttagttcagttgttcaagaccagcctgggcaatatggcgaaagctcatctctactaaaaatacaaaaattagccaggcatggtggcgcacgcctgtagtcccagctactccgaggctgaggcgggagaatcacttgaaccgggaggcagagggtgcagtgagctgagatcacaccactgcaccccagtctgggccacagagcaagactcttatctcaaaaaaacaaacaaaaaaacaaaaaaaaccaggtgcaagcacattataaggggtgaaattaaccaaaaaaaaaaaaaaaattgcttccaaacagcaaatatttcccatcctcgctcctttttagagtataatgtcggagctaattcattaattttcagacaaactaaacatttttgttgacaggaccagcgcatttctctccccatacaaaggcttcagaggaaatcaaacaaccagatggtcacttgggagactggaggcagtgaatgtggaggctgagggaactttctctcacccgttgtatgactttgttcaagtttttagctttccaggtttattaaataaataaatattctaggggctgggacttgagatcttttttaatataagcactacagctataaatttccctctgagtactgccttggctgcatcctaaataccttttggtgtattctatttttgtttcatttgtctcaaaacaaggtccccgttgtaaagacttatttgacccaccggttgctttaagagtgtggtgtttcatgtccacatatctgtgaattttccacttttccttctattatttttaatttcgttccattacagtcagaaaagatactctgtacggcaacgaacgtgacaatattgcattctggagagtatatgaacacaactaacttatacagttgtaacgaaggctaaatgatgtgcgtgaatcatgcgcaagaatcggtgggcagaacaccgaataaataccagttcttacatgacatttcactccacggaaaaatctggagcgcacactgcaccgccgcccgtgtggcctgcccgcaacccggtggctctgcccggccccggcccccggccccggcctcagccccgcacctcgtctccgcccgatggtccactcccgcttcctcaggaggacgtgcggctcgccctcctccgcgcccagacgcaggagccgtccccagggctgcggcggcggcgactgcttgccttcctcgggccgctccatcgggattcacatctgcggagaccccggaaacgcccatggagactcccgaccccagaggccgagactcggcgcccgccccaccccgcgggccccggcccggccgcccgcgcccacgcagccccgcagcccggcctggacgccggcgggcgccccctcccacggccgcaaccaggtcccccttcgccgcccgccgcagccccctcgccagccgcgcttacccccgccccgcgccgaacccggaaccggctgcgccgccgccgctgtcaagagacattgcggctccctcagctgatccgcggggcggggccagaggcctctgcgccccgcgattggctggcggcggcgctcaccaagagcggcagctaaagcggagccgggagtggcccgcgagagtaggcgcgtggagggcgctcggccatctttgatcctgaccaggcgacttcgtcgcctgcggatcacggaagtggctgcggtcggcgccatgttatgttggggcagaagggacggggaacttccggattggaagccccaaggattctgagagccccgctaatctggggatgactcctaggagtagaagacggtccatcttagttgtcacgaggtagtgcacgtggggaccctttcgggtacagttgcacacagtggatcacacagatccgaagtctgaggcacagggcgcggtccgcgagtgggagcggctgcttgtgggcagggtggacgcggggccacgtcttggccggcgttttgcggggtcttcctgttctgaacgcgcgtaacttttgcctcagtatctcacttcttggaatccggcggcgttcacgtgtgtgctccagagaagggcgccagagggtattccctgaaagtgaaaggtcggcgaaagaggagtaaagacggcgagacgcgtccacgcagggggagtctgtgcggtttggaggaacgcgccaatgtctgcactcatgaggagcccccaagggcggttttaagagggtgaagcaggaccgggcgcagtgacttacgcctgtaatctaagtgctttggaaggcctaggcaggaggatctcgagcccaggagttcgagattagcctgagacctcatcgctaccaaaataaataaagtaggcatccatttgtgtaaaacaaaccatatatacacacatatatacatatataaacatttgtatatataggtataggcatagttatctataccttgtaaaccaaaaataaaattgtaagcctccccaaccaactgaatgaactgagtctctcaacgccaaagttaatctgaaaaaccagttcagtccctgatgggaagcagggtttggatatgtcccattatactgtcctccctttggaattcaggtataactgaccagcgtcgacgttaaaacagacaacttaaggctgaccaaacggtctgtagcattaagatacatcacatgacaaatagcaggccctggaagaaaacgaagtattttaccctgacatgtatttatttaacatagttttacgtagccctgcaaaactgtctcctgggggaaatctactttgtagagaatctccttccttttccacatcttttcctgatccaggagagaatgtaagactctggcacctttttaactctgataagaaaagtttaccatctattctctctgaagcctgctgcctggagcggcatctgcattagaatggccagagtggtggtgctcaagcctgtaatcctagcactttgggaggccgaggtgggtggatcgcttgagcccaggaattcagaccatcctgggcaacatggggagaccccgtcttagctggacatgatgacagcacatgcctatagtcccagctattcaggaggctgaggtgggcagattccttgagcccgggaggacaaggctgcggtaaaccacagtctgtgccactgcaatccagcctgggcaacagagaccctgtcaaaaaaaaaataacaaaatagaaactttgtctcccttagcttaacccagacaatcctttctattgattccaggtctttagataataacaactctttcaaccaagtgccaatcagaaaatctttgaatccatctatgaactttctccctaaaaggtgtaaaaccggctgggcgcagtggctcacgtctgtaatcccagcagtttgggaggctgaggcaggtggatcatgtcaggcctctgaacctaagctaagccatcgcatcccctgtgacctgcatgtatatatatgcctagatggcctgaagtaactgaagaatcacaaaagaagtgaaaatggcctgttcctgccttagctgatgacattccactacaaaagaagtgaaaatggccggtccttgccttaactgatgacattaccttgtgaaattccttctcctggctcatcctggctcaaaaagctccctcattgagcaccttgtgacccccacccctgcccaccagagaacaacccccctttgactgtaattttcgtttacctacttaaatcttataaaacggccccactacccctatctgccctttgctgactctcttttcggactcagcccgcctacacccaggtgagtaaaaaactttattgctcacacaaagcctgtttgatcgtctcttcacatggacgcgagtgaaatttggtgccgtgactcggatcgggagacctcccttgggagatcaatcccctgtcctactctttgctccgtgagaaagatccacctacgacctcaggtcctcagaccaaccagcccaaggaacatctcaccaattttaaatcgggtaatggcctcttttcactctcttctcccacctctctcactatccttcaacctctttctcctttcaatcttggtgccacactttaatctctccctactcttaatttcagttcctttccttttctggtagagacaaaggagacgcgttttatccatgaacccaaaattccggcgccggtcatggactcgggaagacagtcttcccttggtgtttaatcgcgcagggacgcctgcctgattattcacccacgtttcagaggtgtctgaccatgcagggacgcctgccttggtccttcacccttagtggcaagtaatgcttttttggggggcaagaaccccccaaccccttctctccgtgtctctaccccttcttcactttcctgggtggcaagcaccccccacccccttctctccatgtctctaccctctcttttctctgggcttgcctccttcactatgggcaaacttccaccctccattcctccctcttctccattagcctgtgttctcaaaaacttaaaacctcttcaactcacacctgacctaaaacctaaacgccttgttttcttctgcaacaccgcttggccccaatacaaacttgacaatggctctaaatagccagaaaacggcactttcaacttctccattctacaagacctaaataatttttgtcaaaaaataggcaaatgatctgaggtgctttacatccaggcatttttcacacttcgttccctccctagtctctgttcccaatgcgattcctcccaaatcctccttctctccctcctgcctgttccctcagtcccaaccccaagcgtcgctgagtctttccagtcttccttttctacagacccatctgacctctcccctcctccccaggctgctcgtcgccaggccaagctaagtcccaattcttcctcagcctccgctcctccaccctataatctttctgtcacctcccctcctcacacccggtccggcttacagtttagttccttgactagctcttccccacctgcccaacaatttcctcttagagaggtggctggagctgaaggcatagtcagggtacatgtgcctttttctctatcagacctctctcagatcagtcaacatttaggctctttctcatcagaccccactaaacatatacaggaattccgatatctaactttgtcctacaagttaacctggagtgacctaaatgtcatcctgacttctaccctctccccagatgaacgggaaagagttttttctctagcccaatctcacgctgataaccaccggcttcacgagccatacctccaggaaggcatcagagcagttccccgagaggatccccaatggaactatcaggcagattccccaggtacagctaggcaagattacatgatttcctgcctagttgaagggcttaaaaaggcagcttacaaacctgttaattatgacaagcttaaagaaactacccaaggtaaagacgaaaaccaagcccagttcatggcctgcttagcagcaacactcagacactttaccgccctagacccagaagggccagaaggccgccttattcttaatatgcattttatcatccaatccactcctgacattaggaaaaaacttcaaaaattagaatctggccctcaaaccccacaataggaatgaatcaaccttgccttcaaggtgtacaataatagagaggaggcagccagacggcaacgcatttctgagttacaattacttgcctctgctgtaagacaaaacccagccacacctccagcacacaagaaattcaaaatgcctaagccgcacacacctaagccacagcagtcaagcattcttacaagacttcctccatcaggatcttgcttcaagtgccagaaatctggccactgagccaaggaatgcccatagcctgggattcctcccaagccgtgtcccatctgtgcagggacccactggaaatcagactgcccagctcgcctggcagccacccctagagcccctaaagctctagcccaagactctctgactgactccttccaagatctgcttggcttagcggctgaagactgacgctgcctgatcaccctggaagccccctggaccatcatggatgctgagcttcgggtaactctcacagtggcgggtaagtccatcccctgtttaatcgatacgggggctacccactccacgttaccttcttttcaagggcctgtttcccttgcccctataactgttgtgggtgttgacggccaagcttcaaaacccctcaaaactcccccactctggtgccaacttggacaacattcttttatgcactcttttttagttatccccacttgcccagttcccttattaggccgagacattttaaccaaattatctgcttccctgactattcctggactacagccatatctcattgccgcccttcttcccaacccaaggcctgctttgcgtcttcctctcgtatccccccaccttaacccacaaatataggacacctctactccctccctggcaaccgatcacatgcccattactatccccttaaaacctaatcaaccttaccccgctcaatgccaatatcccatcccgtggcatgctttaaaaggattaaagcctgttaccactcgcctgctacagcatgggcttctaaaacctataaactctccttacaattcccccattttaccgtccaaaaaccagacaagtcttacaggttagttcaggatctgcgccttatcaaccaaattgttttgcctagtcaccacgtggtgccccaccgtacactcttttgtcctcaataccttcctccacaactcactattccgttcttgatcttaaagatgcttttttcactattccgctgcacccctcgtcccagcctctctttgcttttacctggactgaccctgacacccatcggtcccagcagcttacctgggctgtgctgccgcaaggtttcggggacagccctcattacttcagccaagctctttctcatgatttactttctttccacccctccgcttctcaccttattcaatatgttgatgaccttcttctttgtagcccctcctttgaatattctcaacaagacaccctcctgctccttcaacatttattctccaaaggatatcaggtatccccctccaaagctcaaatttcttcatctgttacctacctcatgataattcttcataaagacacacgtgctctccctgctgatcatgtccaactgatatctcaaaccccaacaccgtctacaaaacaactcctttccttcctaggcatggttagatacgttcaactttggatacatggttttgccatcctaacaaaaccatcatataaactcacaaaaggaaacctagctgaccccatagatcctaaatcctttccccactcctctttcctttccttaaagacagttttagagactgcccccactagctctccctgattcatcccaacccttttcattacacacagccgaagtgcagagctgtgcagtcagaattgttacacaaggaccaggattgcatcctgtagccttttggccaaacaacttgactttactgttttaggctggccatcatgtctccatgcagtggctgctgccgccctaatactttcagaggccctcaaaaatcacaaactatgctccactcactctctgcagctctcataacttccaaaatctattttcttcctcacacctgatacatataatttctgctccctggctccttcagctatactcactcttcctttagtctcccacaattaccattgctcctggcccagacttcaattcggcctcccacattattccggataccacacctgaccctcatgactgtatctctctgatccacctgacattcaccccatatttccttctttcctgttcctcaccctgatcacatttggtttattgatggcagttccaccaggcctaattgccactcactagcaaaggcaggctatgctatagtatcttccacatctatcattgaggctaccactctgcctccctccactacctctcaggaagctgaactagttgccttaactcagtccctcactcttttttttttttttttttttttttttttgagatggagtttcgctcttattgcccaggctggagtgcaatggcgcaatctcggctcactgcaacctctgcctcctgggttcaagcaattcttttgcctcagcctcccaagtagctgggatgacaggcatgcaccaccacgcccggctaattttgtatttgtagtagagacagggtttctccatgttggtcaggctggtcttgaactcccaaactcaggtgatctgcccgtctcagcctcccaaagtgctgggattacaggtgtgagccaccacacccggcgccctcactcttgcaaaaggactacatgtcaatatttatactgactctaaatatgccttccatattctgcaccaccatgctgttatataggctgaaagaggtttcctcactacgcaaagttcctccatcattaatgcctctttaataaaaactctgctcaaggccgctcctttatgtatctctcagcaaagacccactggaattcccctaggtaacctttcaccttctcgatgttcctttattcttcatctccaaagcccaactacacacatcactgaaacaattgaagccttccagctccatattacagataagccctctatcaatactgacaaacttaaaaatattagtagtaattattgcttaagaagacacttaccctgcatttcactccatccttggctaccttccccttgctcatcaggctctcctcccaggccctcttcttgtttacttatacccagacccataaataatagtgaaaggttgctcgtagatacttgacgttttctcatacaccatgaaaatcgaacctccccctctatgcagttaccccatcatgaaaggttgctcgtagacacttgacatttgctcacacaccatgaaaatcgaccctcccctctacgcagttacctcatgatgaaaggttgctcgtagaaacgcgacgttttctcgcacaccatgaaaatcgaacctccccctctacgcagttaccccatcatgaaaggttgctcgtagacactcagcgtttcctcatacaccatgaaaatcgaacctccccctctacgcagttaccccatcatgaaaggttgctcgtagacactcagcgtttcctcatacaccatgaaaatcgaacctccccctctacgcagttaccccatcatgaaaggttgctcatagacactcgacattttctcatacaccatgaaagtctaacctccccctctatgcagttaccccatcatgaaaggttgctcgtagacacttgacatttgctcacacaccatgaaaatcgaccctcccctctacgcagttacctcatgatgaaaggttgctcgtagaaacgcgacgttttctcgcacaccatgaaaatcgaacctccccctctacgcagttaccccatcatgaaaggttgctcgtagacactcagcgtttcctcatacaccatgaaaatcgaacctccctctctacgcagttaccccatcatgaaaggttgcccatagacactcgacattttctcatataccatgaaagtctaacctccccctctatgcagttaccccatcatgaaaggttgctcgtagacacttgatgtcttctcacacaccatgaaaatcgaccctcccctctacgcagttacctcatcatgaaaggttgctcgtagacacgcaacgctttctcgcacaccatgaaaatcgaacctccccctctacgcagttaccccatcatgaaaagttgcttgtagacactcagcgtttcctcatacaccatgaaaatcaaacctcctcctctacgcagttaccccatcatgaaaggttgctcgtagacactcagcatttcctcatacaccatgaaaatcgaacctccctctctacgcagttaccccatcatgaaaggttgcccatagacactcaacattttctcatacaccatgaaagtctaacctccccctctatgcagttaccccatcatgaaaggttgctcgtagacacttgacgttttctcacacaccatgaaaatcgaccctcccctcgacgcagttacctcatcatgaaaggttgctcgtagacactcgacgttttctcgcacaccatgaaaatcgaacctccctctctacgcagttacctcatcatgaaaggttgctcatagacactcgacattttctcatacatcatgaaagtctaacctccccctctatgcagttaccccatcatgaaaggttgctcgtagacacttgacgttttctcacacaccatgaaaatcgatcctctcctctacgcagttaccccatcatgaaaggttgctcgtagacactcgacattttctcacacaccatgaaaatggaacctccccctctacgcagttaccccatcatgaaaggttgcttgtagacactcagcgtttcctcatacaccatgaaaatcgaacctccctctctacgcagttaccccatcatgaaaggttgctcgtagacactcgacgttttctcatacaccatgaaagtctaacctccccctctacgcagttaccccatcatgaaaggttgctcgtagacactcaacgttttctcacacaccatgaaaatcgatcctcccctctatgcagttaccccatcatgaaaggttgctcgtagacactcaatgttttctcacacaccatgaaaatcgatcctcccctctatgcagttaccccatcatgaaaggttgctcatagacactagacgttttctcatacaccatgaaaatcgaacgtccccctctatgcagtcaccccaccagtccccattacaacctctgatggctgctgccctagctggatccctaggagtgtaggtacaagacacccctttcagcactccttctcatctttttactttgcatctccaattttgcctggcacaaggtcccttcttcctctgtggatcctctacctacatgtgtctacctgctaattggacaggcacatgcacattagttttccttactcccaaaattcaatttgccaataggagcaaaaagctccttgttcccctcatgacaccaacatgacaaaaaagagttattccactaattcccttgcttgtcggtttaagactttctgcctctactattgctctcagtactgggatagcaggcatttcaacctctgtcacaaccttctgtagcctctctaatgacttctctgctagcatcacagacatatcacaaactttatcagtcctccaggcccaagttgactctttagctgtcctccaaaatcgctgaggccttgacttactcaatgctgaaaaaggaggactctgtatatttttaaatgaagagtgttgtttttacctaaattaatctggcctggtgtatgacaacataaaaaaactcaaggatagggcccaaaaacttgccaaccaagcaagtaattacgctgaactcccttgggcactctctaattggatgtcctaggtcctcccaattcttagtcctttaatacccatttttctccttcttttattcagacattgtatcttccgtttagtttctcaattcatccaaaaccgtatccaggccatcaccaatcattctatatgacaaatgctccttctaacaatcccacaatatcaccccttaccacaaaatcctccttcaacttgacctctcccattctaggttcccacgccacccctaatcccgctggaagcagccctgagaaacatcgcccattatctctccatgccagccccccaaaaaaatttttttcgctgccccaacacttcaacactattttatgttatttttcttattaatataagaaggcaggaatgtcaggcctctgggcccaagctaagccatcacatcccctgtgacctgcatgtatatgcccagatgacctgaagtaactgaagaatcacaaaagaagtgaaaatggcctgttcctgccttaactgatgacattccactacaaaagaagtgaaaatggccggtccttgccttaactgatgacaattaccttgtgaaattccttctcctggctcatcctggctcaaaaagctccctcactgagcaccttgtgacccctacccctgcccgccagagaacaaccccctttgactgtaattttcctttacctacttaaatcttataaaacggccccaccccatctcccctttgctgaccctcttttcagactcagcccgcctgcacccaggtgattaaaaagctttattgctcacacaaagcctgtttggtggtctcttcacacggacgcgagtgaaagatcacgaggtcaggagttcaagaccaacctggccaagatggtgaaaccccttgtctactaaaaatacaaaaaaaaattagtcgggcttgttggcaggtgcctgtaatctcagctactcaggaggctgaggcagagaattgcttgaacccgggaggcagaggttgcagtgagccgagattgcgtcactgcactccagcctgggtgacagagtgagactctgtctttaaaaaaaaaaaaagtataaaaccaagctgtagccccaccaccatgggcacagggtcttaggacctcttgggactgtgccgtgggccgtgatcactcacttttggctcagaataaacctcttcaaattttgtagagcttgactcttttaattaataatgtgtacatacaaatatgtttatgaaaatgaaaatctctctagaaggatacacaaggaaatggcggtggcttcctctgaaacacggacttaaagtcaaggggtaatgaagacttacctttcactatatgtttctctcagtcagttccaccagaaaaacagaaccaaaatcggtaggatgatggagaacacagcaagacccatgaattccatgagcatgggcccacggtgcacctcatttactgtgaagtgggttcttcgatcagaagcgatgtcattgttacaggaaaaagaggagttccagtccaggctccaagaaagggctcttagatcttacacaggaaagaatttgaggtgagtcactgagcaccgtgaaagaagcaagtttatcagaatctactctgttacagagtaaggcatcctcagaaagcaggaagaggaatgctgtacaggaaactcttaaggagctacaattaaacctggaatgtgcagatgtgctcactgaaggtagggctattggtgctatcagtgaccattaatccttcaacctaagcctgctcattaaggttctctctgagtaaagtgggctgcactcttaggacatctggacattctgcaggcttggtgggagatgtcccgtatgaccataaatatttctgcaattataattggtggtcagcttagaatgtggctattttcagaccatagcaaccttacaggtgtcttgtgagtgcctagctacttaccttaagatagagtcactctggtcatgttttatgaaaccagaggcctggtaaacaggtttctctaacaccacaacggtgggtaaggtattctgtgagttttgcactgtcattgcgtgatgatggagtactactctgtatgcctcactttatggcttggggggtcagataacactgagttcgtgatgagcagctcaggtcatgcagtaatttggtgggccatgcttaattattcagtccctaataccgtcctgtagcaagccaaaagctggttgtcaaaagaagagtacgggtggaagagagcgcttctcagacctcggctgcgcggccctaggagtgccgagctcacggaaccacagccatgactgaggccaatgtgaatctgaaggcctagcccctcgccgatgcccacctcaccaagaaaccactggagttcattcagtagtcgtgtaactacaagcagcttcagaaaagagccaacgaggccaccaaaacccttaacaggggcatctctgagttcatcgtgatggctgcagacaccgagccacaggagatcattccgcacctccactgctgtgtgaagacaagaacgtgcccttcatatttgtgcgctccaagcaggccctgggaagagcctgtggggtctccaggcctgtcatcacctgttctgtcaccatcaaagaaggctcacagctgaaacagcagatccaatccattcagcagtccatcaaaaggctcttagtctaaacctgtggcctctgccacgtgctccctgccaacttgtcccccgaggttgtgtatcatattgtctgtgttagcatgtagtattttcagctactctctattgttataaaacgttgaagtcaaaaaaaaaaaaaaaaaaaaaaagaagagtaattatctgcagacaatgtcagggctttgcaccaaaatcctaaaagtctacattgtgattctcctatgcgggcctgccaaggctccacccagcatcgctctctgccactgacatgtcaagcaccattggatctgctgggtcatgtgaccaagtggtagagcaccttgcacaacagcctgcatctgttgcagagccttcacttgttctgggccccactcaaaactagcagctggctgggagctcaagcctgtcatcccatcactttgggaagccaaggtgggtggattgcctgagctcaggagttcgagaccagcctggccaacatggtgaaaccccgtctccaccaaaaatacaaaaaattagccggatgtggtgatgcacacctgtactagggaggctaatgtaggaggctaaggtgggaggattgcttgagcccgggaggtggaggctgcaatgagccatgatagcaccactggactccagcctgggcaacagagtgagaccctgtctcaaaaaacaaacaaaaaaaacccatttatttatttatttatttgtttttgagacagagtctcactctgtcacctaggatggagtgcagtggcacaatctcggctcactgcaacctctgtctccagggttcaagcaattctcccccgcctcagcctcctgagtacctgagattacaggtgcccaccaccaggcccaactaatttttgtatatttagtagagatggggttttgccatcttggcccggctggtctccaactcctgacctcaggtgatccgctagtctcggcctcccaaagtgctgggattacaggcgtgagccaccacacctggccacagaaaaccttttgagatagtcagtgagtcataaaaaattatcaaacatggaaattctcttaagtgaaaatgaagtgagctaataagtacatttttaaaagattactgatgggctgggtgcggtggctcatgcctgtaatcccagcactttgggaggctgggatgggcagatcacaaggtcaggagatcaagaccatcctgcccgacctgatgaaaccttgtctctactaaaaaatacaaaaattagccagatgtggcagcgcactcctgtagtcctagctactcgggaggctgaggcaggagaattgcttgaacccgggaggcgcaggctgcagtgagccgagatcggccactgcactccagcctgggtacagagcgagagactctgtctcaaaaaaaaaaaaaaaaagattactgaggaatttgcttctattaaaaccagaaaagtaaaattaccttttacattttctttttttttttttttgagacagagtttcgctactgttgcccaggctggagtgcagtggcgcaatctcggctcaccacaacctccacctccctggttcaagcgattctcctgccttagcatccccagtagctcggattacaggcatgtgccaccacacccagttaattttatatttttagtagagacagggtttctccatgttggccaggctgggctcgaactcctgacctcaggtgatctgcctgccttggcctcccaaactgctgggattacaggcatgagccaccgtgcccagcccttttttttttttttttgagatggagtcttgctctgttgcccaggctggagtgcagtggcatgatctcggctcactgcaacctcttccgcttcccagtttcaagcaactctcctgtctcagcctcctgagtagctgggattacaggcatgcaccaccacacccggctaatttttgtattctggtctcgaactcctgaccttaggtgatctgcctgcctcagcttcccagagtgctaggattttccttttttttttttttttttttttgtaagtgaaagcaagtttattagagatgtaaagaaacaaaagaatagctactccacaggcagagcagcctatattttccttttgatatgaactttttttttttttttgagatggagtctcattctattgcccaggctggagtgcagtggcgggatctgggatcactgcaacctctgcctcccgggttcaagcgattctcctgcctcagcctccctagtagctgggactactggcatgcaccaccatacccagctgcttttttttgtatttttagtagagacagggtttcaccatgttggccaggctggtcttgaactcctgacctcaggtgatctgcctgccttggcctcccaaagtgctgggattactggtgtgagccactgtgcccagccgctatgaactattttaagtggaaataatgatttttattctattttattattttttattttgagacagagtcttgctctgttgcccaggctggagtgcaatggcgcaatctcggctgactgcaacctctgccttctgggtttaagcaattctcctgcctcagcctcccgagtagctgggactacaggcgcgtgccaccacgcccggctaatttttgtatttttagtagggacggggtttcaccgtgttagccaggatggtctcgatctaatgaccgtgtgatctgcccacctcagcctcccaaaatgctgggattacaggcatgagccactgcacctggcctaatgttttgagttttaatacatgtactttgcaaaactttcttctttacaactactttaaccctgtagggaaaataagacaggaagaaatgaataaagcacatccacaggagtgctcattttccttctcccagactccccaagctgtaggcacgaacactgttctctgcaagtctcacctgggccacgcacttctctggacttgcatggatttcctcccagaacaatcctgattaaggaaacaccaggtgctctctgtttcccgctgccaacccctctgtgaagggaaatgcctaaaacagatctcactccgagatctttactttccagagaaagtaaagaataacgcatgggaacattccagaacatgagggaatctctgcttatgaatttaaggaaagtgtctctggtggacgtggagaaaagggaaccctcatacacggttggaaggaatgtaaattagtacaaccactaccgagaactgtttggaggtacctcagaaaactaaaaattgagctaccacaagctccagcaatccctgatggctagataccggaaagggaatcagcatgtctaagagatgtctgcactgccatgtttgctgcagcactgttcacaacagccaagatttggaagcaacctaaatgtccatcaacagatgaatggataagaaaatgcggcgcctgtaatcccagtactttgggaggcccaggcgggcggatcatgaggtcaggagatcgagaccatcctggctgacacggtgaaacccccgtctctactaaaaatacaaaaaattagccgggcgtggtggcgggcgcctgcagtcccagctactggagaggctgagacaggagaatggcgtgaacccgggaggtggaggttgcaatgagctgagatcgcgccactgcactccagcctgggcaacagagcgagactccgtctcaaaaaaaaaaaaaaaaaaagaaagaaagaaagaaaatgcggcgcatggcggggcacagcggctcatgcctgtaatctcagcactttgggaggccgaggcggatggatcacaaggtcaggagttcaagaccagcctggccaagatggtgaaaccccatctctactacaaatacaaaaattagctgggcgtggtggcgggagcctgtaatcccagctaccctggaggctgaggcaggagaatcgcttgaacccgggaggcggcggttgcagtgagccgaaaccacctccagcctgggcgacagaaacagactctgtctcagagaaaaaaaaaaaaaaagcgaaaaaacgttatttatttatttatttatttagagacggagtcttgctcaagttgcccaggctggagtgcaatggcacgatctcggctcactgcaacctcggccacccaggttcaagcaattcccctgcctcagcctcctgagtagctgggattacaggcgcgcggcaccacgcccggctaatttttgtatttttagtagagactggatttcaccttgttggccaggctggtctggatatcctgacctcatgatctacccgcctcggcctcccaaagtgctgggattacaggcgagagccaccgcgcccggcctataaaaacatttttaaaaaaggacaatgactctagagattccccggcagagttcctctgggaagcttttcctcaccgaagacgcggcctcaagtcatccccaagccggggctcctgggtggcttctcaggaagccaagctccctcaccctgtggcgacgccgcgggcggaatgcgcatgcgcgccacgagccacaatcgtagggttgggcgcgccctgccggccaccaggggcagcgcaggagctgagcgcaccccatcagcgaaagaagcgcgcctccccgctcttttctgaaccgtatctcctaaactataattttggagatcaaaagtgcggtggagcctcctcttctgtggcttgataggagtgggggaggtaacaagaagcaaaagtacaaagccaatatattaaagtcaactgaaactggaaaactttaaaggcctaccgtttgcaataaaacaacaaaaagaaatccttggatacaacaaatccaagaaatccttgctctaacaaaatatgaaaccatctgtatccagaaaactatgaaacactattaaaagaaaacgtaggccggcgcagtggctcacacctgtaatcccagcactccggaaggtccggagcacagagggctcgcctgaggtcaggagtccagaggagcctgggaaatatggccaagccctgtcgttactaaaaatacaaaaattagactggcttggtggtgtgcggctgtagtcccggctactcgggaggctgagatggaaggatggcttgagccctggagagggaggttgcagtgagccatgatggggccactgcactccagccgggggaacagagggagactctatcttaagggagggagggagggaaggaaggaaggaaaggagggacggaaaagaaagagagagaaagagagaaaaaaaaggaaaacataaccggagcatactcctttttcattattgtagtcacaatattgctaagatgtcaattcttcccaactgtagagttggtgccgctccgacaaaaatccccgcaattaatttcgtagatgttgacaaactgtttgtaaacctagaattgtaaatacaaccctgaataataatgaacttgaagaactcaacttccaaatccaaaacttctaaaagctaccaaaagagcactatctttgcaaaagaatgggcattctttcacatgaacaatatcattttatcttatttttaattttttttcagggtgttgctgtcacccaggctggagtgcactggcaccattatagctcactgaagcctcgaattcctaggatcaagggatcctcccacctcagcctcctgagtagctgttactataggtgccaccacgcctggctggaacaatatcatttaaactaagcttacatagaatgtattaataatacaatcacaggcaaggacccttgcttcaaacgtgttaggaagctgcagaattgaggccagccaaaacagagagattaaatcacatacatttctagctttaattttcttcctattttcgcagatcatgattttcataatgataatacatgaagtggtccttataataagtagattctatagagatgtgtattgtatcagcagatgtccggtgtagaatgccacttccatcacagcttctgaacacacaatgctatctacaatcgattaaaaaatatatttcaaaagccagtttccccaatataactaacttcagcattcactgatgtactgaaaacttatatttgccaataatagattttagggtaattcatattaagataggatggtttttaatattatttgaggatagacaggaaattttagttgagcaggttctattttgtttgagtggatccattaaaaagattgttattattgccgagtgtggtggctcgtgcctctaatcccagcactctgcgaggctgaggcgggaggatggcttgagcccaggcgtttgagaccagcctgggcaacctaggcagacctcatctccaataaaaatacaaaaatcagcctgacgcagtggcacgtgcctgtagtctcagctacttgggaggctaaggcgggaggaccacttgagcccaggagttcgaggctgaagtgagctatgatggcaccactgcactccagatgaggcgacagagactctccctctaataaataaatcaatacatcaatgaaaaattttaaaaagattatttgttgactgtcagggtgatttattcttctaataaatagaatatttacttacaattatatatcttctcattaatactccagttctggttacaaactggtaaaaattgagataaaatcataaaactaaccaggaaaacattgacctgctaaaaacatagaatcagtgaaactactcaggaaatacttgctatgacagattactctctctgttaaagggtcccatgtagagacatttctatgaatattgaacagttaacaaaaaactgagactgggggagtgacagacaattcagattacaaagcaaaagcaacataggattcagataaatacgataccatggtgaaacaaaatctttaaagcacaaatggttttgaatgtagaagctcatatttcactaactattcactgatgcgtagtccacttttcagcagtgatctccaatcagtccctcctttcacagaagccagcgcaggaggcgcacgcgtcgcttcccgccccgcacttcaccgccccagcccgtcctggctgccacccgccgtccctgagaaacgctcagacgcttctctctctctttttaaaattatactttaagttctggggtacatgtgcagaacctgcaggtttgttacataggtatacacgtgccatggtggtttgctgcacccatcaaccagttatctacattacgtatttctcctgatgctatccctcccctggccccccacccccgacaggccccggtgtgtgatgttctcctcccattgtccatggtttttattttattattattttttgagacggagtctcgctctatcgcccatgctggagtgcagtggcaccatctcgggttcaagcgattctcctgcctcagcctcctgagtagctgggattacaggcatgcgccgccacgcccggctatttttttttttttttttttttttttttttttttgtatttttagtagagacgaggtttcaccatgttggccagtctggtctcgaactcctgacctcgtgattcgcccgcctcggcctcccaaagtgttgggattacaggcgggagccgccgcgcccggcctcagacgtttttctctaggtaaagccgcgggatgaaccagcccctgtggaaatttagaagtaacgacgtccgtcaatttctgtatgaaaaatatacagatcgtgtgacacgtcttctgggaatgaaagtctgctaaactcgccgtcacgagtagatgaacacatttaaagtttgtagttaagaggaaaacaacgccaacgacacaaatgccccaagcgctggatgaagcagcgacctaggatggggctggcctggaacgggaaccaagacgcccgcccggacgaaaacgagcagggaaacccgggccggggtcggccgccccacacgacgcactgcgcagagaccacgcggctccgggtctcgcctgcgccggcgcatccctcgcagacgcgctcctcccacgcgagggccccttccccgaagcgcacgcctaagactgcgcgccgcagcccgccctgtctagctgaggcgcagacccggatgggtcccagaggggcgggtcggggcggagagccgcgcccaaaggcaatgggagccgcacgctgctaggcaacatgctgtctcccggcaacgtagaggcggggaattcgccaacgtgtctgaaacagacaacaattttagccaacggctgcgtgggccttgggcgtcctggccaatgggaatagtgaggggcctgtcactaagaaacctgtccctgagcaacgcataggaggggtggaacccagcagcgctgactgagccgccgcgaagtgccggaacgtattacctgggagccaaatttcagagcgtcgtttgtcttcccaagcccaccagctttcagcgttctccagcctcgccacacccccgcctcgggccgtccccgcccagacgcttgtccccgcgagaagctgagcgcactgaagtgagcccggcggctgccgccggaggaggagcccggctctggacacggccgtcaggaagctcagaggctgcagcaccgcttctgcgttgatttccgcttgacttttactcttttcttgggttaaaaatcaaacgccgacccgaggcgtcagagatgggcggtcgttaggcgcagtggcggcccccggatgtttgcgatgggacggcgggctcggaacgtgtggacgtgggctttggaggtgcgagccccattgggccagggctgggtccgggcagtggtacggggtctcagctgtccgtcacaggagatgtgcaggcctcgtcatctggggtcttacgtgtcagtgatgtggggtctgccgggtcagtgagggggtctgtgaggtcactagtgggaggccactcccaaagtgattcccctctgtcccacctgcttccctgagaaaagctcacttatccttcaccaggatttaaaaatatatatcctaagaccaacctgtaatatttttttcttttttggagacagggtctctttctgtcacccaggctggagtgcagtgccacaatctcattgcaacctctgcctcctgggctcaggcaatcctcccacttcagcctcccgagtagctgggactacaagtgtgtgtcaccacactcagctaatttttaaattttttatagagacgaggtctcactctattgcccagactggtctcaagcgagcctcctgccttagcctcccaaagtgctgggattacaggcatgagccaccgcgcccacccaatattctctttttcatggaccttgtttagttgcactaaaaaaaaattaatatattttatttttgtttagagcgtgttgggtttacagaaaaatcaactggaaagaacaaggagttccccccatccctttctaccttagtgttccccttatgttctaccatagtgtttcccctatatttacgtttcatattactctggtacatttgttacaactgatacaccaatattaatatattattattaactgaagtttatagtttactttttttttttttttgagtcggagtcccgctctgttgcccaggctggagtgcaatggcacgatctcggctcactgaaacctctgcctcccgggttgaagcaattctcttgcctcagcctcccaagtagctgggatgataggtgcccgccatcacgcccggctaatttttgtatttttagtagagacggggtttcaccatattggccaggctggtctcttggcccggctggtcttgaactcctgaccttgtgatccacccgtctcagcctcccaaagtgctgggattacaggcgtgagccaccacgcctggcccttttttttttttttcctgacggagtcttgctcttgttgcccaggctggagtgcaatggcgcgatctcggccccatgcaacctccacctcccgcgttcaagtgattcttctgcctcagcctcccaagtagctgggattacaggcatgtgccaccacgcctggccacaagttttaaattttaatgaagttcaacttatcagttttttgtttcacagattgtacttttggtatggtatctgagaaaatatcactaaacccaggatcacctagattttcttctgtgctgtcttccaggagttgtatagttttgcatttcacattcaggtctttgatccattttgagttagtttctgtgaaaggtataaggtctttgtctagattcacatttttgcctgtggatgtccagtttttccagcaccatttgctaaaaagactatcctttctccattgcattgcccttgctcctttgtcaaacatcagttgactatatttgtgtggcgctgcttctgggctctttattctgccccactgacctctttgtccattcttctgccagtatcagagtgtctccattactatcgctttataggaaattttgaagttgggtagtgtcagctccccaacattgctcttctccttcaatactgtgttgactattctgggtctatttctaatctagcaatggaagttttgcatttcattagtctttatttatttatttatttcagacagcgtctcaccctgtcgcccaggctggagtgcaacggcacaatctcggctcactgcaacctccacctccagggttcaagcaattcccctgcctcagcttcccaagtagctgggattacaggcacacaccaccacacctggctaattttttgcatctttggtagagacggggtttcaccatgttggccaggctggtcttgatctcctgacctcgtgatccatctgccttggcctcccaaagtactgggattacaggcgttagccaccgcgccctgcctcactagtcttttcaagaaagaagcttttagatgtggatttattatctgttaattctcattttcatcttcattatttcctttttgctacttttatttggatattttctaggattcttcctaatctcttgggttggatgcttaacacttacatttccattgatcctgttttcctaatagaggcatttggggtaatgcattttccagtaagtgccactttagattatatcccattttgtgtggtgtcctatatcagttaaacccaccgtattcattgtataaatcaaatttttcatatacttactgtattagtccattttcacgctgctgataaagacatacccaagactgagtaatttataaagtaaaagaggtttaatggactcacagttccatgtggctggggaggcctcataatcatggtgggtgaaaggcacttctgacatgctggtggcaagagagaatcagagcaccaagcaaaaaggaaaccccttgtcaaatcaccagatctcatgagacttattcactaccatgagaacagtatcagggaaaccactcccaagattcagttatctcccactgggtccctcccacaatatgtgggaattgtgggagctgcaattcaagatgagatttgggtggggacatagccaaaacaagttatctcccaccaggtccctcccacatgtgggaattaagggagctgcaattcaagaagagatttgggtggggacacagccaaaccagatcacttaccaattatgtgctgtcctgctctatcaattcctaagaaaagtgtgcaaaaatttccaaatggtaatgtggatttgtagtttattcctctaattgtcctattttgtataatacattctttggtctatgttaatttgaaattttgaacatagaatcattatatcttcatagaaaattgtacttttatccttatataatgaccctttttattcctaacgatggtttccctaaagcttatgttacccaattaatgtttgccaggtatatatttttccactcatactcactttttataacatttttatgcatttattttataaacatatacatggaatattttaaagcataatgcgacattctgcttttaaaccgatgagtttatatgatttgtgattattgatacagttggctgggtgcggtggctcacgcctgtaatcccagcattttgggaagccgaggtgggcagattactaggtcaggagatcgagaccatcctggctaacatggtgaacccccatctctactaaaaatacaaaaaattagccgggtgtggtggtgggtgcctgtaatcccagctactcaggaggctgaggcaggagaatggcgtgaacccgtgaggcagagcttgcagtgagccaagatggcaccactgcactccagcctgggcgacagagcgagactccgtctcaaaaaaaaaaaaaaaaaaaaaaaagattattgatacagttatgtttatttctatcattttactttttgctttccattggccttgtgttttttgtcccttattattttctatcttcttttggatttaatcaagctttctcacttccattttcaatatctattctttaagtgttaatgttaaggtgtttgctatgtatacaagacttaacaaagtctaaaggtaatcacttaatctgctctctccataaccaacagagaggcatcccaattttttttttttttttgaggcagagttttgctcttcttgcccaggctggagtgcgatggcgcgatctcaactcactgcaacctcttcctcccaggttcaagcatttctcctgcctcagcctcctgagtagctgggatgacaggtgcctgacaccacgcccagctaatttttgtatttttagtagagactggggtttctccatgttggtcgggctggtctcgaactcctgacctcaggtgatccaccagcctcggcctcccaaagtgctgggattacaggtgtgagccaccacgcctggctccaatttttttttttttttttttgagacagagttttcactcttgttgcccaggctggaatgcagtggcacagtcttggctcactacaacttccacctcccaggttcaagcgattctcctgcctcagcctcccaagtagctggaattacacacacccaccaccacagctggctaattttttgtatttagtagagagagggtttcaccatgttggtctggctggtctggaattcctgacctcaggtgatctgtctgccttggcctcccaaagtgctgggattacaggcgtgagccactgcacccagcgtcccaacatttttatctctgatcatcctgaacacataccatgttactcactgttttagttctgcgttatttttgttgcataaccagtaacataacattattattgttagtttacatagccaatactagtttaggttcacatgtattacctcttggcttcacccactacttttctctgatggcaatctttggaagttccttcattgagggtttattagtggtaaactctttatctttgctgtggtgcagtgtctagaatttttgttaagtgaaggttttacatttaaatcttcatctattaagtttgaatatgggatgagttatggattgaggttcatttgttttgtatattgactttcaattgttgcagcaccatttttttaaaccactattttcattgatttgcccttgcaactttgtcaaaaatcaattgaccatatacacgaaggtctatttatgtattctcaattatggtccatgatctatgtgtttatcctttctctgacacaatgtttagattgctgtatctttacagtaagtttcgaagtcagggagtgcgagtcttccagctctgttcctctttgacaaaagatgttttggctattctagtttcttctgcttttccaaataaatttgattaacttgttaatgtctacaaaaactcctgctggaatttccattgggatcgcaataaatttataggtaaatctagagagaactgacattctactatttattgttccaaaccacaaatatgatacatatttccatttatttaggatttggatttcccttatttctctcataagcgttttgacgttttcaacatacagatcttttataacaacacttacccacttcccaccattctacccccattcctaaaccttggcaacacaagaatctgtcctccattaaaaatgttatgatttcagaaatgttatataaatggaataatacaatatgcaaccttatgggactgatttcttgcatttggtgtacttctctagagattaatccaagtttttgtgtgtatcagtagtccatttattttcctgaatagcattccatatgtgtgtgccacaatttgtttaaccatttaccttattctcagtttttggctgttcaaataaactgatattaatctgtgtacaggttttggtgagaaaatatatttatctgggataaatccccaaaagtgcaattgctaggttatatggtaatttgatgtttaattcataagaaactgccaaactgttttctagaattgctgtaccattttccactcccactggtaatgtattagtgatacagcttctatgtaccctcaacatttgatggtgtcactattttttttttttttttttttagacagagtcttgctctgttgcccaggctggagtgcaatggcgtgtcttggctcactgcaacctccgcctccaggtacaagcagttctctgcctcagcctcccgagtagctgggattacaggtgcgcaccaccatgcctggctaatttttgtatttttagtagagatggagtttcaccatcttggccaggctggtctcgaactcctgaccgcgtgatccacccgcctcagcctcccaaagtgctgggcttacaagcatgagccactgcacccagccgctgtcactatttcttttcttttttgagacggagtcacgctctgtcgcccaggctggggtgcagggacacaatctcggttcactgtaagctccacctcccaggttcacaccaacctcctgcctcagactattttttacttaagccatcttgatatcttgataggtgtgtagtagcacttcattgtgatttgaatttgcgtttcccaaatcactaatgatagtgaatgttttttcatgtgcttgtcatctgtatgtttttctcagtgaaatatctgttaatgtctactgcccattttataatgttttttttttcttttttttgggatggagttttgctctgtcacccaggctggagtgcaatggcacagtctcggctcactgcaatctccaactcctggattcaaacgattctcctgcctcagcctcccgagtagctggaattacaggtgcatgccaccacacctagctaatttttatatttttagtatagacggggtttcaccatgttggccaggatggtctcaatctcttgacctcgtgatctgcccacctcggcctcccaaagtgctgggattacaggtgtgagctactgcgcctggcctgctgtacagttttaaagatgaattacattgatgtattttgaaatattcaacttacccttacatacgtggaataaatcccacttggtcatggtgcatacttcttatatattttgaattttgttttcaaatattttgttgaggattttcacatgtaagttcatgacagatattggcctgtagttgtgtgtgtgtgcacacgtgtgcatgcagtcatgctgtcttcggtttgttatcagggtagtgtaatactggcctcataaaatgagttgagagatatattccccctcttctatttttctggaatatcatgtaaagctgatataaattattctttaaatgactggtacagttctccatctgggcctagagatttctgtttgggtagatcattagtagttcaatttctttactggatatagggcttttcgatactcaacttcatcatgggtgagttttggtagtttgtggtttttaagaaattaatccatttcttccaagctgttgaatttataagtgtgaagttgttagtagagatccttttttatttttgatgttggcaaggtctgtaataaagtatttcatttttaatactggtgatttgtatctttttatttctgtcaatgttgctataagttaatcatttttgttaatttttttaagaatgagctttagttgtcctattttcaatcactgacttcagttctttatcattttcttccttgcacttgttttggatttattttgcacttgtttttctagtttcctgaggtagaaacttaaattactgatttaaaaatctttccttatttctcatgtacacgttagaagggtaaaatctacttttgtgtgtgtgtgtgtgtgtgtgtgtgtttttgagacagagtcttgctctgtcccccagtctggagtgcagtggcgctatctcggctcactgcaacctccatcttccaggttcacgccattctcctgacccagcctcccgagtagctgggactacaggggcctgccaccacgcccagctaattttttttttttatattttagtagagatggagtttcaccgtgttagccaggatggtcttgatctcctgaccttgggatccgcccgcctcggcctcccaaagtgctgggattacaggtgtgagccaccgtgcctggcctacttttttatatcaagttgtgtgtgtttgcttttgttttgttttagagatggggtctcactcactccgtcactctgttgctcaggctagagtgcaatggtgtgataactcactgtagcctcagactgggctccaggaatcctcctacctcagcttcccacatcaggctaaattttttttttttttccaagacagtcttgctctgtcacccaggctgaagtgcagtggtacgatctcagctcattgcaacctctgcctcccaggttcaagtgattctcctgcctcagcctccagaggagctggggttacagaagcccacaactgcgcccagctaatttttgtatttttagtagagatggagtttcaccatattggccaggctagtctcgaactcctgacctcgtgatctgcccgccttggcctcccaaagtgccggcattacaggcttgagccaccaggtccagcctaaaaaaaatttttttttagagatggggtcttggctgggcgtggtgactcacacctgtaatcccagcaatttgggaggctgaggcaggtgtatcacctgaggtcaggagttcgagactaggctggtcaacatggtgaaaccctgtctctactaaaaatacaaaaaattagttgggcatggtggtgcacacctgtaatcccagctacttgggaagctgaggcaggataattccttgaacctgggaggcggaggttgtagtgagctgagatcgcaccactgtactccagcctgggtgacagagtgagactccatctcaaaaaaaaaaaaaaaaagagagatggggtcttgctatgttgcctacactggtcgggaactcctgagctcagtgatccttccgcctctgccaccctagtagttggcattacaggaataagccactgcagcgggcaagttgtgtatattttgacaaatgcataattgtgccatagaaaacactagtttttaatattatttgaaccatctaattatagttaccagtgctttagaaaacaaacccacataattgcctatgggatggaccaaatgacagctaattgttcattgtcctaaagcaggaaagttaaaggggtgtaaaaaattaacagaagtgggtggtcctgcaaggaagggggttaagtagacaggatcaggctggagacgtttcagctcactctcactgaggataaaaggaacagacaagaaactgaaagggaacagctgcttctttgggtgtgggggtgtatctggatgcttatggatgacaacaaattgaaaactgatgataattcagatttaatttggggatacctggttggaatggaaaccagagtttatttgcaaattgctcccagtgatcacactcacacatatgaattcatgaaacagtttactcagttaacatttgcatacagagattttcttttcaaacagagcacagaaggaagtgtcagtaacaggtctgacctcgcacagctgcccatgcaatgatgagtggatcaaacactacggcttatacaagatgctcctcacagaatgaaaaacagctgctcattttcagttagctattagccttttagccccacccttgttttctctttttttgagacggagtctcactctgttgctcaggctggagtgcagtggtggtgccatcttggctcactgcaacctccaactcctgggttcatgtgatttgcccacctcagcctcccgagcagctgggtttacaggtgctccaccacacccggctattttttttgttttgtatgtttagtagagatagggttttgccatgttggccaggctgctcttgagctcctgaactcaagtgatccacccaccttggcctcccaaagtgctgggatgacaggcgtgagccatcgcacctggccagccttacccttgtaatgaagcagtgaagtacagctggcccacatctcagccaacatcatcttcttacagaatctgcttcatacaaacgcattacacacaacaggacacaatgcacatgccttgttcataccctcagagctgcctggcaaataccatggtttggggacgaatctacactagacctgcctggctgcagtggtaacactccattgcctaactgctcctttcacatgagcacgcactaatgaaaataaaaagttaattcacttctcccaccccctattgtaagtttaagcttgatttgtttttttaagtacttttagtgataggaatgcttacttgctttattaattatttttgtggagaacaaagtgccactatgttgcccaggctggcctcaaactcttgggctcaagctctcctctcctcccagctgggcctcccaaagtcctgggattgcaggcatgagccaccacatctggccagtaatgccttttttttttttttttttttttttgagatggagtctcgctttgtcgctcaggccagagtgagtgcagtggcgcgatctcagctcactgcaagctccgcctcccgggttcacgccattctcctgcctcagcctcccgagtagctgggactacaggcgcccgccaccacgcgcggctaattttttgtatttttagtagagacggggtttcaccttgttagccaggatggtctcaatctcctgacctcgtgatccacccatcttggcctcccaaagtgctgagattacaggcatgagccaccatgcccggccctggccagtaattcttaaatgagaacttcaagttataaatgtcccttcacttacatttcttttcatcttaacagtgaatgcctcgatagctacattctttttgctgtgcacatttcgagatttaggtatcactaaataagtttggtgttccctgtttttttgtgtgtgtgtgtgatggagtcttgctctgtcacccaggctggagtgcagtggtgtgatctcagctcactgcaacatcggcttcctgggttcaagcgattctcctgcctcagcctccggagtagc

SEQ ID NO: 478 - DNA, 40001 bp, Homo sapiens
gggggttgaagccccaattttgagtttaactcatccctctgcacccctacccccttttaaacagacacctaaatgaatttgttaaagcacgggattaaaaccagacttctgtgtactgaattctgcccgtctgtatgttttggtctggtgtagaatcttttaaaaatagttaccaaacttaaaaataaagatttcacatttaaataagttttgtattttcatcttcttgaaacaattgaaagctctgaagcagtgactgggctcttatatggcaacaatttagcaggagctgaatagtgattgcccctttaatcccagagtaagttctctttttgcctctggcatgacttactccaattccctcatttctgttgcctgctggggccttgtagacagttgagatgcacccactgacttaaagcagataagataatgtgcttagaaaatctgaacaacattctagtgactctttcattctctagggttgctcaaagaggggaggaacattctagaaattataaaagctgagtttattgctcctgagtagaaaacaaatagtaattgttaaaagcatagttttatttttttttaagtatgtggagaagggagagccagcataggtttaccaagagcagagtctatcagatttacactttattttcagtagagttattttgacatattagaggatgagagatacagtatctagattttattgaggcatttttatatggagagaaggaatgaataactggcttcctaacgttttgagaaatgtgttcccaaaggcttgtggttaatagatcattgtctacctggaggtcagtgctatgtgtctatattagttcttgcattgctataaatacctgagactgagtataagaaaagaagtttaattggctcacagttctgcaggctctgcagaagcatggtagcatctgcttctggggaggtctcaggaagcttccagtcatggtagaaggcaaagggggagcaggcacatcacatggtgggagcaggagcaagagagaaggatgggggaggtgctacacacttttaaatgatcagatcttgtgagaactcactattgtgaggacaataccaagaggatgatactaaaccattcatgagaaactgtccctataatccaatcaactcctaccaggccctaccttcaacactgaggattacaattcagcatgagatctgggtgaggacacatcctgatcatatcagtgtcataggccatttcatgtatggcctttttatccagccgtggagtgaagattttgttggagtaagctcctcaaggatgtcaaaaagcattagagttattacatagtaactatactgagggataatattcaaacagttgaaatgaactgggagagcggataagagacttttgagtctatttcttccctttgtcctttgaccagccacagatttgacattctcctccaaaggtggggaggttctgtgtttacatactgccattttataactaggacttgaatattttccttcaaatactatatttttatggctttcttgatataaacttagttatttccctgttacttagtaaattatatgaaccgggacttctaaatatatgggaactgatgctaaggaatcctataagagcttaaatcctataagagcttaaaatgctgtggacttttgaggagtcacaaggctatcagaaaaaaaaaaggccaccagaaccactaataatctacaattaacctcttaacctcttttctgtttataacgggatgtgggtggctgtggcaggtgaatgtggattccaggagatcgtgatgttacaatagcgtttccaacctataaatcttctttgagtcaactttagatggcttgtgacaaacgctgggaggttaagctgcttaatctgaaacccagtggacttcactgtccttgaaccctgagaagccatggcttccagaaggagggggcccttggttgagtgacaaagtctgcagtgatacagagctggtgagacagtatgtgggaagacagatccaattaggccttcatagacccaaatggctaagtgctctaataaggtggggtaaatactaggtcttgcataagtacagagtggtaggagatgaaaatagtccgtgcctttatggagcttcttgtttagtgaagcagagagtcattaaatgagtgactgtatacagtgaagtcctcgcttacgtcattgagaggatcttagaaactgcaactttaagcaaaatgccatataatgaaatcattattttctcatcaaccttataatgaagtgaggtaaatatttaattactgttgttcaaaggtgtcggaagctaaagacgggaatctagtcaaagcttccctaaagccgttctgaggcttaagctaggtttgaactgagtaggaaccagacaaggggagttggagggtggaggtgagaagggcaggtggggagaagaggtttccactagagaaaaaccatgcacaaatgcccgggagtataggacttctttggaaaaccaaagaccagtttggctggagcatgaagagaagtgacacatcctgagaaacacacatctagctggctgtcagccaggtggtccaagaaagtgtttgtagtttgttacaccacaagtcaccggttttaagtccaaggcatggcggatgatcgtcttcacttgacactgtgctttccagaccatgcctagagtattgtgtttagttcccgataccattttacaaaggacagagatacatggaaccatccacatccatgactgtctaatgaggccaaggagctaaaaatgtattaaatgagttcagtgaaagacaaaaaggctgtttggcctaaagaaggagagatgtaggagtaacctcaaaactgcctttaaatatatgaagtgcttttagtggagacagattaaaacctgtgaccctagtggaggggatgaggtcccatgaggagaaattagcagtggatttcagcttgtgctctaaaaattggagctttgcaatatgggcgagacccccttaatgaaaaggagcatttctggcccttggagaggtttccacagtgctggctgatcactcctgcaagttttgataagaaatccaaacagcttataactttggattaggtgacctttgtgttccaacacgtcctttcccacacactacttaattttttccacagtcgtttagtgaagttgttaagaacctgggctctggggtcaaaagaacttgatttaaaatcccagagcaaaggcccaggatgatggtatcttgggggattttcattttcttctggcaggtgcctgggggcacagctagtcttggagcaccttgatttaaattcaagctttgagggttttggatccctctggtggcttgatgtgctgcatgtccaggtcagggcctgtgtctggaaggtgtagccctttggggttacaagtagagaggggatggtttatgagaatctctttgttggagggggtggggagaactgacttttgcctttctggccttgtgagtctgccaaaatactatcctgtatcacagtcttttttccttcaggtttgacaaatattcttaggatgaaagagtggctttgaatgctcagtggtttacttcttggggttctttgcttttgctagatatttgacccattgcatcctcaatatcttactagctgtttaaatgctttcaagaaggtgtttcttttttttctgagacggagtttcactcttgtcgcccaggctggagtgcagtggtgcgatctacattcactgcagcctctgcgtcccaggttcaagcaattctcctgcctcagcccctggagtagttgggattacaggtgcccgccaccacgcctggctaattttttgtatgtttagtagagacggggtttcaccatcttggccattctggtctcaaactcctgacctcaggtgatccacgcgccttggcctcccaaagtgctgggattacaggtgtgagccactgggcctccagatgtttcatattttatccaacttaattacttctaatattttaatttacatgaaggacttttattattattattttttttgcttagctccatgtgattaactgttaatatccttttaattttcttttacattttaatttatcttcttgaaagggttatatatgcatatggtattaaattccaaaaggtataagaatgtatagtgacaagtatccctctcaccactctctagccaccaagtacccccaccacccccagagataaccactgttaccagtttctgttccatcagcactgtgctatacaggacctttcaaaacttagattggcttttgtaacttgtagttggatacaaatctgaaagtttcaaaaaacaggaaatgaccaaatcatttagtaaggatagtggttacttctaggggagaaggaggtacaggagcctcccatggtgccaacaatattctgttttcttgactttggattgtggttaaactgcccagatagattctaagcaattctgtgtatatatttcacatcatgcatgtgtatgcacatgcacacacatctaaaaaaaatctgcaaaactgatcatcttgaagacaaccagagagaacaaatgggttacctgaaaaacaaaattgattcacagtagtgtgctcaaagatgatgatagaagccaaaaggaaataatgtcttcaaagtgctgattttaaaaaagtcagtctagaatttcatatccttcaaaactgtttttcaagagtgaatgtaaatttaaagtaatttctaatagattgaaagagtttacaatgaactgtgctgaaaaaaactactgaaggatatattacttttgtaagaaggaaattgagcttataaggaaatagcactgtttaaaataagaattaaaatagaaaatgaaagagaaagagtgagcacctaaaatgtaatgcaggttcatataataattcctgtttactctctatggcaagcatttcctatcattgaatccagtatcaaccctgtcattattatttctgtttttcatgtgagaagctgaggctcagaggggttaagtttcttacccaatgagcatagtggtaatgaatgcccaggtctggcaggctccaatgcccaagttctgtccattgcactacaatctatcaccaaatttagaaacagaaatataaaaagatgacaaaatcacttgtaataacacatagtgtattagtctgttctaacactgctaataaagacatacctgagactgggtaatttataaaggaaagaggtttaattgactcacagttcagcatggctggggaggcctcaggaaacttaaaatcttggtgggaggggaagcaaacatgtccttcttctcatggtggcatcaaggagaagtgcagagcgaagtggaggaaaagccccttacaaaaccatcagatctcgtgagaactcactatcacgagaacagcatgagggtaaccacccccatgattcaatgacctccccccaggtccctcccatgacacgtggggattatgggaactagaattcaagatgagatttaggtggggacacagccaaaccatatcacatagataacaattatttatatagtagtatatttctttcccgtttttactcccacatacatattttaaacaagtgaaatttcccttatttcataaatatttgtcaaaaacattttaaaacccccaaactgacctttggccttttcaagtttggcaatgatgaatctggccattgtcatggctggaaatatcttggttggggctctttgttctgactgttacatagtcggattctctttgtcttcttatgtggtattgctttgagcttcagactgatacagctgacaatctttacaaagtaaggattttaagtagataaattttgagaaggacaacatgtaaaaaggatctctgggtgccttccagaaaccaggcacaagtttttattatctcagcttaactatatggttttcttctttctttgccttcattcttttgctgcctgtcagagctgacagcaatagaggccatttcatgcatggtttccatgtctcacaaaacatggtctgaagaaaaaattaccgaaagaacaaatgcccttttcaagctcttggtcccttttttcagttattgggcggtcttttcccattgccctctgtctttagagtccagtatgtctaaaatcaagctcttcttgccccagcacctattccaggtatcctacctacattatgctggccattcaggtgtaacaccttccaatgatctctgagtattatctacctcttcctctccatctcgcctcctctctccaagagatgagagaaagcggggtgataacatgagaggaaggagagatggcaggtgtcggggagcaaacagtcctccatccaggggggaagggagagaaagtgaaatgttaaaagatgttcgtaatgtgatgcagtgtaaccccacactccatagccatcagagaactttagcaaggaaggatttaccttgcttcttggtgattttgaatcagatttatatagttataatcattactattattatttatttgatgcagtaagttgagtattgcaaaaagaagatgactcagcaatgcccagatgatagaggtcaccaagggatgagccacatttcatgatgaaatggtttgcaaggtaagttaaggaaaagcacaataaagcagctcatttactgacttcatctgtactcatatggcagaatgagccactctgaccaacccacccatgggaaacaattaaacattttggataaaatataaaaaatattcctaaaagcattgttgggctggcatgaaggcaggatttatgcaggccaaaaacccaatgaaggtagaaatgtgcaactgtaagcaggcagtaaaaccaactttggctttgaaggcatttgctgagcccagtgaacttgagcttcaggtttgattgactgatgcggcatgggagagagaagctgcatgtattagtcaggttctccagagaaacagagacaataggatatttgtgtgtgtgtgtgtgtgtgtgtgtgtgtgtgtgtgtgtgtatctttgtctatagacatatatatatagagagagagagagggagagattgacttatttaaggaattagctcatgcaattgcaaagactggcaagttcaaaattggcagggcaggcaggaaagttggagacccagagaagagctgatgttgcagcttgagtctgaagacagtctggaggcagaatttcatcttccttgcaggacctcagtctgttttccttaaagccttcaactgattgaatgaggcccactcacatcatggagggtcatctacttgctgaaagtatactgatttaaaaaataatcttttttttttttttttttttttgagatagagtttccctcttgtcgtccaggctggaatgcaatggcctaatcttgggtcactgcaacctccgcctcctgggttcaagtgattctcctgcctcagcgtcccgagtagctgggattacaggtgcccaccaccatgccttgctaatttttatatttttagtagacacggggtttcaccatgttggtcaggctggtctcgaactcctgacctcaagtgatctgcctgccttgacctcccaaagtgctgagattataggcgtgagccactgcacctggcccaaactttcaaaaatcaaaactaagataattgaaataaaacactcaacaattgagtttaccagcagattagacatagctgagagagaattagtgaattagaaaaccttatccagaatgcggcacagaaagacaaaaatgcgatatatggaaaaagtttaagtgaccttgagggaaaggagatttaactcatgcctaaaaagtatagaaggagaagaaggagggaatcggggcagaattaatatttgaaaagacgatggctggaaaatttctggaaatgaaagatgataatccacagattcaaaaaaacctaacaatttccaagcaaaaacagaatacatattaaatttcttagggagggctatacatgtatttgtctatttttctggactattcaaaaaacaagctaaaattctatggtaaaagggtagaaataaattgtatataaaattcaggatagtgatttcctgatagtgacagtgacctttaaaggtgggggaagagaggaggatgtgacacaggcttctaaggtactagtaatattctgtttatgaattctatgcccctggatttttaatttatgatctttcttcagattgcacacatcctctatatactattttaaatgtatattgtatttcatggtggaaaattaatttcaaatatattattcaacaagatttgatcaaagaggttgtgggtgtattaacaaggtggcttctggaatttttgcaaaaacaagagagaaaacttcgaagagaaataatgtttaggctaggtgtggtggttcacctataatcccagcactttgggaggccgaggtgggtggatcactttaggccaggagttcaagaccagcctggtcaacatggcaaaacctcgtctctactaaaaaaaaatacaaaaactatctgggcttggtggcgcatgcctgtagttccagctactcgggaggctgagaggcaagagaatcacttgaacctaggaggcagaggttgcagtgagccgagatcctgccactgcactccagcctgagcaacagagcaagactctgtttcaaaaaaaaaaaaaaaaaaaaagaaatagtatgcaggttaatatgtttaggcacaaatgaaagtagtttattaaaaagaaaaaaaaaaaaaaaaagccagaaaacttttctgtgtcccgaaatgcctcctgaaaagcacacattacttgggttttctttttcgcctcttaaaattggggtgggttagggtgaggggaagactgctctccaccgaggaaggcagagagaagctgctgcagttgcctgtcttatctctgcctcggtcttgcaccccactacaccagtccctattcccacgtctggacccccgccccgtctcctgacacagaggcttggctatccaaatcccaaccccgagtctgtaactaggaagtgcctgctgtcctgccaagggactggattggaggaggagagtgcaggggtgggatgagggaagagatggaggagggggctttaagccagagtttctagcaggagcaaataccggcacagggaaggacaccattggccagggtatgcagaggaaggcaaagctgctgaatggccactgtggtcctcagccatgagtagggacgtctgatggcctcagaagctgccttgtgattgagcgtgaagggacaggatctgaggtgctggagctcggggtaggctaagatggccatcttggcagtttgccctagacagtggtgcctatgcacctctcagccaggctgggctggtcttagcgtcacagggctgagtggcagccattgagttcgctactgtcccgaaaacagccctgcagtctctcccgtggggttcactacagggcggtgcttgccaccaatccaggggtacatagaattttatcacagtgagaaggaggctttgggcagagaccacagaagtccagcggcattgatgaccaactctgctttcttaaagctgcagtgttacttggagcctcaaggtggtacagcaacacagtctatggtttaaaaaagcctgaattacactttgtgaaaagcttccttgggcacaattagcttgacgatttgaactgtttctcagtcgcttcccttccttgtttcaaatagcctggcttctaatctggcctgacctttgaggtcctttcttgctggctcatccacctccatccccactcggaatcgggagggttttcttagttctttggttactgaaaaggaaatccttttctgcccaggttccctcctcagattcaggccagaactgctcccctgtggtcatggggcctgtcttcataggcgccacctggacctgtgccaggcagacagcagaggtgagttccagggggttcctctgaggtcacacctgcttaggtgcatggaggctcaggtgagcagactgcagactgccaccaccagcgtcccttctctgtttaagccacctgcttccttatttcactgattcccactggcctccccttcatatacatcctcactatcgtttttggaattttctattaacatttcatgatatccatgctgtttagaattcgcttctattctaaacatactctaaattttactccaaatttactctctactcaaatgtcaccttatccatatggtattccctgaccacctgtgaacagcagcaaccttccatcactagtgagccccttatgttgctttatgttccttcttagccctttcaccacctggcataagtatatatttgttatctcttcacccccaagggcagaaggcccccagttttgttctcttctgcatctccagccctggaacagcgtttgcatgtggtgggcactcagcaaatgctggttgaatggatggatggatggatgaatgaatgagtggctagggagaatttcaccccttcccaacaggtcaaaagcattgttctgacagtttgtagtctagggtctggctttggctgagccactagttacttgtaagactttgagcaagtcacttggcctccccaatggcctatttttgaatctgcacaatgagtggactggactgcattgtctgcggttccttcctgccccaacagtttttggttttatgattatcctccaaaaggggctaaagccataagccaggtgacagacaatatgcattattggcatgacacttgcaagtaataagctagcatcaaaagatgcattgatatatgtaaataaacatacttacttcacaatctttaagtctttaaaaattatgtccttaagaaagtctcaaatgtattggccttatgtttctattttgatctctggctccatgtgttaatgactctgatatttttctgacaaataaaaggttttaaaaattgctattgcttatttgggttcttcctaggttatttcttctcattagtaacatttctggggaaagatgtcatgctcttagtgtgcatccaacatgaaaaaatatttcaaaataaaacaatagtaattttttaaaaaccctcttacctttgaaaagaaccatcgccttatgccataatcttcctcttgctatttggctgtggttattttttaggattggtatatgtctggcatctagaagacattaaaatatttttaatgaagagtcagtgtcatgtgggaggaaaaaattcgtatcctgggatatgggtggaacttcatgaaagtgattgtgtctttcttatccaagggaagaagtttttgttctttctgaatgaacttgagggaaaaaggcaatcaatgtttttccagtgtaacctgatagattctccaagtcctcaagttcaaatatttattcttttgtctttgtaatgaaaacaaaaccaaacttgtagtaggcatactcatgatctcccaaatatgtccaggtccctatccctggaaactgcgaatgtgttactttacatggcaaaagggactttgctgatgggataaaaggagggatcttgagatggggagattatcatggattattcaggtggatccaatctaatctccttaaactgagaaacatttcccagctatggtcagaggacaacacgatcagagggagcgtctgagatgcatccttgccggctttgaagagggaggaagggggtcaagggccaatgagtacaggtagcttctagaagctggaaaaggcaggacatagattcttcctcagagcctccagaaggaaagataatcctgatgagacttttattttagcccagtgagacctatgtcagacggaactccagaactgtatgataataaaatgtgtatggtaaggcactaagtttgtggaatttgttacagcagcaatagcaatacattaccttcttatttgaacagaggctttcagctccgcagtgtaaaagaaaagaagccaggctagggtctagagttgtgcccttcagtttggtagctgctggtcacatgtggctactggagcccttgaaatgagtgctgagatgtgccgaagtgtagaatagatgtcgatttcacaaagattgagtgtgaaaaagaaaatatctcctaatttaataatttattcgtgtctattacatgttgaaatgccattactttggatatgctggtttaagtgaaatatactattaacatttatttcacatattttttgaacttttgtttttaatgtgactactagaaaatttaaatcatttgtggtccacgttatacttctattggacagggctgttctagagaatccctaaatataggaggtggtcatttcaacagtagacaggtctccaaccaagtggtgagtgatgaaaaagtccaggcacagaattccaggaggagaggtcaggctttcttacgtcttcctgtattggaccataagagaaggtgttgtatgggtctttatgtcctcagggcctggcacatactcagaaattgtttgcagagcatccatttgatgttgctgaccctagaaagttctttgacaaggcaccaaagggtggaaaattagtcttgaaacaattgccctgaaggaacttgaaactgtggtctaacagaaaacaggatgcaacaactgggtcttttcccgtttgaccagtatttgttgccccaccttacacctcatggacacgggcatttaccatttccaggaaagaaagatctcaaaaagaattacaaaccaaaaggcagccttgggtatcagagcccaaataccaagaagcattcatgtaatgatttcagtttggcctctttcttatctcggtgccaatttctcagcaatgcagagaaaaatgacttgagctcagaattaggagatgaactttccatttgaaatgtgcgttctcctctgacttgctccatgaacaagttagcttccctgcagtccccttcatcatgcctgctaagaggcaagtgtttacatttatcaggactgagcgctacgaggtgaggattaattagtgactctacttagaattatttttaaaatatcaagaataatttgcttccataacaaattatcctggcttgggattctgggacaggatttgggattctgatcagttgcttccctaacagcctgacactgacatttgcagaatctgttgtggtttaacaggtattataagttcaaatatcatatttcagagtgtctgctatggttacaggtaactaaaggttacagttttccccccatatgatgtcatttgcttaactcaaatgaactttgtgccattaaaaatggggaaacacaatttatttcaatgccatttgagtctgttttgaggtattgcggacggaaatatcctggttactgggtttggatgattcatgcagtagagcagtctgaggaataaactttatcttgtcctcatctttatttttgttttctatatggaaactaatcatttgaggttggcaacatggatttgggctaaatttcttcaatgaatttttttctacgtttccctacttcagaccaaaaatctccaaccctaggctgttttccaaaagcaaacctgctcatgagctctctgacagagtgctagcctgtcggaaattacagtaagtctccttctgaggttggttaggctgagaattcattgtattttggttaaaaacagagtgttacaatttgatcctgggagcaagaaagaattagtaatgaaaacattgttggtggagactgttgcctggtacacaggctgaactcatttgtctggcccccggtacgggtggcccatgtgaaaatacacacatacacacacacacacacacagacacacaccacccatctgttacgtttttcctgatgcttcaggaaagtctgcaaattaagacaaatgatattatctgggagtaactgatcatcttttcactatgaaaatgtcatattcataggaaatgaataacacacctgccaaaaatcaggtcgcctaaatgaagggatcaagggattgaatacccatggagaaaataagacagacacaatccaactgttctatactagttgacagcaacctattctaatgatatggttaagatttataatggccatataggtttaccttctccaaccaaactatttaaataattccacaagtctcctatttaatattgaagaccatctccttagctaaaattattatgctttaattgaccatatataaatatcggagggttttggagagtaccattagaccatgcacaaccaagcacagttggattgagccttgaagatgtgcatggttcctcccgcccgtgctcttcctggtgaatgagtagcttttttccctgcactaatctgttcagtttgagggctgctggaagcactaccttttattctcttttcattttctttacttcactagttcacagagctggaggccacaggactgtttgttacatcatcactgctttaaaagcttatttttgtgaatgcgattgtacttgggggttgtcaaaacctgtggaaatgtggcctttggtgaccggccatggcataatatgacaacatttctggagtagtccagcactgggaatggtacccttgggtcaggcaagtaggaggcagtcatttttgtctctggagctgctggcactcaagcgtagaggaggtagacatttcaatggccagttgcttttgtatttaaacaaatagatcctggattgtagatttttagaaaactgcagatgcaacctgcaacagaatcacctggttagcttactcccctaccagctgacgagtcttagatcagatatactgaagcacagcctctggggatggggcactcaggaatccaaatttctttaaataaactttaaattttagaatagtttcagatttgcaaaaaagttgtaaaaatagtacaaagagttcccatatacctcatacccagttttccttattaatatcttacattaggatacatataatatacatttgtacaaatgtgcaatgtaagtaatataaaatgtacatttgtacgatatacgttatctgtatcataatgtaatgtacaatgtaaatcctaatgaaggatacaggtaatgtactttgtgatgtacaaataacatcttacattagaatgcagataatgtacatctcccccactcgtttatttatttgatcatttttttatgtcagtatggactcatgaataccaagttatatttcagtaccacattataaatgtacattatctgtatcttaatgtaagatattaataaggaaagctaggtgtgaggtatatgggaatgctttgtactagttttaaaatttttttgcaaatctgaatgtatgaatgtacattaggtgcatttgtcacaatctcatgattaaccaaagtcaatactctatgacctgatgtcctttttctgtaagattccatccaggatgccacgttacatttaattgttacgtctccataggctcctcttggctgagacagtttctcagactctccttgttttcagtgacctttgatagttttgaagggtcctggagagtattttgtagaatgttccttagttgaattgtttgatgtttttctcatgttttaactgaggttatgggtttctggaagaaagatcacagaggcaaagtgcccttctcatcacgttgcatcagtggcaccctcaacgcaactcacagttgatgttcaccttgatgacctggctgaggtagtcttgacaggtttttctactgtaaagtgattcttttttccaccttttcatactttactctttggaggggagtcactgtggatagcccgcacttaaggagtgggagttgtactccacctccctgagggggagtagctacatacatgatggaattcttctgtctagagatttatctattctcccccacttgtttatttatatgttcatttatttatgtcagtatagactcatgaatatcaagttatactccagtgctactttgttaatcagattgttccagctttgtccattgggaactctttcagtgggatcccatgtctctttgatgtatcccctttcttgtgatgtttttgggagcccttccggcactttctgccactacaagatgctccaggaattaacatttttgaccagctctatcatactgaaaaaaaccaagatttatcattttcggccatcaagaccagaaattttaaatgtcccgcttattgttggatgtggaacaaagctgtcaaaagaaaaatcacactaaagaatgtgtatgtatcttcaaaatctctctgtttatttggtaacatctatagcccaggcacgtacagagaggcagttatttaaatccaatcaagagactaagaagttcaagagatctattgtataacatggtagctatagttaataacaatgtattgtacacttgaaaattgtcgaaagagcagattttaggtgttatcacaaaaatcataatgagaagtacatgaggtgatgcataagttaattagtttgatctagccatccacatgtatatacattttaaaacatcaggttgtacaccatagacacatatactttttgtcaatttaaaaaagtagtgatttttttttaaagagactaaaaattgaggagaatcatctatgaaacattttcctggaaaccacaaggcttttgggccacaggcacctcactgggtgtggataacaattgttgagttagcccagcccctatcaaagaggatcttaagccatatcaaccacttcttaggattttctggtgacttctgagagaggaagagtcagaaacacccatgggcagtaacacccagggctggctctggagtgggggtgaggtcattgaggggaaggccagggtttgggtgagcctgtgctgtagggatggaactctggttggcatagggtactgagcgtgtctctgtatgtgcatccatgcagacttgcacatgggtaaaaattcatttaacccaccttgataactaccatctaccttttgtaactggatttgatttagagtcagctgtagcagggtgtgtgtgctatgttgacacaacaaatcatggagatgcatttaggacccatttcagatccttgttgaatgctctacggtgatgatgacaatacagtcacgatacacaaaaccaggcccagcatgaaggcaactggcttttgcttttcttggcccttccttggcttctacatttgccttggcttctctgccatcgtggaacatcagttcacctttccagaatacatctggtggtgtttctattaagtaataccagcaaattacatataatccttggcattaggacatttaaaaactggtgaatgtggctgggtgtggtggctcatgcctataatcccagcactccggaaggccaaggcaggcagataacttgaggccaggagtttgagaccagcctggccaacatggtgaaaccctgtctctactaaaagtacaaaaagtagccgggcgtggtgatgggcacctgtaatctcagctactcgggaggccgaggcaggagaatcgcttgaacctgggagacggaggttgcagtgagccgagatcgtgccactgcactccagcctgggcgactgagcaagacactgtctcacaaaggaaacaaaacaaaataagacaaaaacagaaaacctcaaaaaaccctgctgagtttctggtctcatgcacgccaggaatcatttgtcagtgattatgatgtatactcccatgtgtccattttgactgtttttcctcctctctaccccaggccgtaccattcctcctgccgtcctcacatattctcccacggttctgcagatgaaatgtaagaacttcctccaggtaatcttccactggcaggctgcattgtcaacagcagctgtcctccaggtaggattcttggcataccctgaagcattctggaagcacttgtgttttttagcactttagccagtattgattatttttattggggattgagtgtgttgtgttttgtctcacaggactttttcacatctgttgctgtgcttaagtttatggcagagattcatttgaaatgggatttttttgtcttttttttccatttgaggcaagagtgcagatgggcttttaattttcttgctgccacctgggaagaatttgtcatttcattcctaaagacaaaaagaaacacatctgatataatctaacacaagtctatgctaaacaactccaacaactcgggtagagtaattccagcaatttgtgttgattatctatgtttgttaaggatatctcagtgggaagacttccaagtaacccttttgagtttccactcaaggcattttttttcttcttcatattcataaagctcctaaaggtatagattgataatttgacgggaaaagctaggtaaatagaaccaagcaactgacttacaagagagctagcgtaaaatggatggagacacaaggaagaaaaagctttgtgtatcttcgcagatatgaacaaagcactaggcggagctggtggccttgtaggatggtgacccagggtttctgcacagggtctgcctccctgcttgtcacccctgggtcctctctctggctacactgctgtgttttccctggccacttcctctccagggctgcctcacactgaggggtactttcctctgccttccccaaggatgcttctctgggcttcaagccacccagctttgaccttgcagtcacctccttcattttcttcctttggaaggtctcagtgagattccaccctaacgcctcacccatttcttctttccaaactgtcagagagcatctagagtgctacccaatgatgaaagcatatcccagttttgggggaagcctggcttctttgagcattcaaatgctgcaaactggctcttgggtcctaccctgtaatcgctgcaaaggcccatgggctggcttggtccatcagcaaaaggtcccttcttccttatgccagttggaacacacccagaggccagactgtggtgcaggcattttctctgggagaggggaatcctctagtgtttcctctggacaggacacctacctggcacaggtgcccagactccccttttggtctttctcctgctttccttttctctctccttcaggggtgccatttaattcagcaaggacagtttctcttgctgttgacgtgtggatcaactctgttaaccctggatccttaatgttcttcagagccacagcccacaagatcaaaccctctccaacaaaataaaatgaaacaaaacaaagaaaccctcttgctaatataaaacttcgatgtataatgtgccaaaccttcccaccctaaacacacacacaacacagaccaggggtgagggttgggaggataaggtgaatacaagctcatcttttgccattagcaattctctagtagccctgggagctcccaggtccattgagttttggaggttggtggcatcacgcaggtcccactatggaaggaaatatgttacccaacagtttttgtttctttcaaaacacctacttcctttggcagcaaactcctgcttcttgtgtgagaggcatcttcatctcacaccttggagcgagcaaagatgcctcatgtcccagagcagagcagtggctgcttgcacttcctgctcttccatctgccccaggtttcttaagaactcacaccattccctgtattccatttcttgtaatcttttttgaacagttattcaaatattgtgccagacagtgtgagggtggtggggcaaataatggaaagtgttcttgttcccctgggacctacatttcgagggagaggtagataggcattttcataatcttcattttctttgcattctttatttgtgtttacctttctattgagtggactgttaaggaagcaccagaggagggagagaagagctttgacgtagatgaccaggagagtgttcttgtggaaggaggaatttggtcatgacctcgaaggacatctaggactgtgattggcaggaatgcatggtggaaagaacagttctagcacaacagagcacaggagtgggacatgtcagggccggacctcagggtcccctgagtagttccatgggagagctgtggcacccgtggcgaggtgtggaaatagaaatgggaagggaccttggggtgatgctgttggaggcttctgcagtagaggagtgtttttccagttattacagtgttaactatataaaaactactttgtctatatacatcaaaaatacccagcataattatttttccagtatagctgtcactcaccactatactgttgctttcaattttaagctttaaagatgatgtgagagaaaaatagtatcctagtacctgtgtggatttttttcccttcctaaaatcaataattctttcatttttaaagtcaattttgcctttgtaaatgacttcatgccttttgtttttgttttgtgcttgtagcttgtacgttttggagctttaaaaacaaactctggggccaatccacctaggtttaaatctcagctctgttgcttcacagaagtgcaatttgggcaagttacttaactcgcctgttttttagtttctttatccatagaatggagataatatttctatgtatccttcacagaaaataatctgtgaggatgaagtggaatacatgttacaagctctcactgcctcgcatggagtaaacaataagggtttactattgttattattcttttaaaaattaaatgaattcatgttggtgttgaaagagggtgatacgtgcacatggggatgtgacaatcacagttacagccctctattaatagccaagggtgaatcataaatgaaactcccacccaaagcctcccaaggcctccccaggctgaggcagtcactgttcggtttctggtgtatccttccagaatcactttgagtttctagggtgtatgtgtatgccttcctgtctctgaatctgaaatgtgtgtgtgtcaatctgtgtgtgtgtatatatatatctgcacacatatacatgtgtacatgtatatgtatagtttcacaccttgtattttcctatcttaacgtatcatactgattatttcatatctgcaatatagatctatataattcttttaaatggcaatgtagtatctcatttcatagatatataaaaccagtcccttaaaaatgggctattaagatgcttctagcctttgtcttacaatgttgcaatgatccttttagtacatttttatttcgatggatattattcaattgtaaattatgaagtaaattcttccctgtctttccataaaatcaatgcagtctacattttttccctcatgctttatgaaatggatttactttgagatgtgcatgctgcttcaaggtggtatcgaaaaatcagtttacttacatgcgagttatagggagaactatttaagtgaagaaaattcctctgtaggaatactacattgccctttagatgtttcttttgaagaaaaaaatgtttaccaccttaagcacaaaaagcagaatacacatcactatttatgactgcagatattgctttctcagtatattttaaaacaaattcatgagttaaaaaagacaaaggtggaatatctgtgtatgagtaggtgaatattcttaaattttccgtatttttccagtcttagggaatgggcatgtgttgttttcataattgaacataaaaaggaagaagacacttttaagagtatcaaattaaaagagagaaatgactgctggaggaagacctgtggacaattttaagaaaaagggacaaaaggggaaagggacatataagaatcaagaaacccgatagtggggtctacagctaaaatcctagggactccaggcaactcttggataatactacagctaacacgatagatattaatatttggggatcttgagtcattgcaagaaaggcttagcaaaaacatattggttcaagtaagctagcaaggacgcatgtagtacatcttaatctccatcaagataattttgaagtgttgtcgtttaaagggtaaatcagctgctatctggacaatgcacttatatggacaacctcattgcttaacaatgctggataaatgaggcctttaccgcatttctttttcttaaaagtatagttacttttaaaaatgctatcttcagacaaatctgtttgctgattatttggttagctatctttgattatactagtccctccttgttcaagttgtttaagaaagtgtcactataaaatattgaaagtggccgtggcatgacttggaaaaatgacccacagttctaattccattccaaagaattcaagggactttccagataaattcatttggagtctacatggaatttgcagttaggaaaggagctgatagaagcttatactttaaccatctataaagacagggtttacaaagcagataacatgtttaactttcaggaaacaaactccttaagtatcatcaggttttgttgcagatgtctgttcacaaacaaatggtgtgtggtatatgacattcctgatcaacctcattttaaaatttaacttccaagagatttactcgacagcaatctattaatctacttgtaacaatgatacatttcattttggtttttttgagtcagatttccctccctagccctctgtcattccttaaatggctttgaattacgaggttaatgtctcattttactaacctattttgtaaatttattgtattgaatattcttgaaattatgggccttgaatttccatttttttcaacttttattttagaattagggggaacatgtacaggtttgttgcattgacatattgcatcatgctgagatttgaagaacaaatgaatccattacccagctagtgagcatataccccaaaggtagcttttcagcccttgcccttctccctctcccctcatctaatagtctccagtatctactgttcccatcgttatgtccatgagtacctaatatttagctcacacttataagggagaacatgcggtattttgttttgtttctgtgttagtttgcttaggataatggcctccagctgcagccatgttgctgcaaaggacaagatttcattcttttttatggctgcttagtattctatggtatacaggtactacattttctttatccattctgcagttgatgggcaccttgattgattccatgtcgttgctattgtgactagcactatgatgaagatatgggtacatgtatcttttggcagaacaatttattttcattcgggtacatacccagtaatgagattgctgggtcaaatggtagctcaactcctggttctttgagaagtctcccaactgctctccacagtggctggactttttttttttaatgtggagattttgtcacaatgatttctgctttgatctataaggagaatgtcatccttttctccttattgccaatttgtttttatccccagtcttaatgaagattctgttagccttcccctaccctaccatttgtccccatattcctaaaaccagatacataagctactgaaggaaagaaaaccatagaaatacagtttatctctcacagaaatacatttcttacaatctgccagtgaatgccaaacaacttctcgaggctgtgattcttgtgatccaagtgatccctcccaggtgttgatgcctttgacatcagggcaggtgattcttgcctgagttgatgggccagcccagctgagcagtcagttgagccctctgtgctggatgactatggtcctcactgagacacagctgagcttaatgagccatagactggaggctgggactcctggattttttgccaactcttgaccttaggaaatacctcacctctctggtcttcaattccaccatctttgatataggagtgtgaaaattttagaaagtcgtttctggatctgaagttcttgattctaatggaaggaaaagaaaagcaatcacacgttcctagctatagcttaaatcaggaggtattgttctcacttaccaagactttctctcttttccctcccccatgctctggggttcatcattccttccactgggttcccactgtggtttgcccttgaagactccacccgagagtttatgacttgatattataattatctgtttatattttccgttcctttatgggaccaagacctgctagaaggcaggaactgtatctcactcctcttcccatctccagtcccacacccaggatctctcacatcacaggtatccaagaatgactgttgaacaatagaattagaacagtagaggtaaaaagcaacaactctgagatcccgagagagattttttccttatcagagcactggactggcagtcaagagacactggtttggcacctgatggcccttggacagctcatttaacctgcagtttgccaaaatcaccttgaagaatagagtcactaattgtcacaatttcttgaacccatactaaacctattattaccatccccattttgctgatgaggaaatcaagtcccagagagtattagatgacttgttcaaggcatgccagttaacaagcggatgggctggcattcaaagcttatgcttttctgactacaccgcactgcctcctattatgcagtgtatattgctagattgatatgtcagcacttcatgaattcataatatgtacagggtgcagtgtatgtgcttggtggtagtgaggaagttgtaaaaaacattacttagatgctacatttgtacccaatgtgtagtttttagcccttatgcgatttaatctgttcccactgtttgatcctattggccacttcctccttgaaacacatttttctcttggcttttgtgtcacatccttctgtttgtggctactctttttcagtctcttttgaagattcttctttcaaagccattaagaattgatgtttcttaaagctcggccctagactccctgctctgttcattccttctccctcccaagcatcaacatctgaggcaagggctttggtgactacctctgtactgatgattcctaagttgtatccctgagctccagactagtatgcctgctagacatctccacttgaatgtctctagggcactgaaagttgaggtccaactaaattcatgctgtccatcctctttccaatgcccccttctggttttcttccagtttttctgaatgccccatcatgtatgtaagccagaacccaggagctatcctttggactgctttctccttcacttttctccagaagcaaattcattaccaacccctatcagtgctaccaataatgagttcttatatctgcctccttctatttccactgccaccgttgtagttcaagccaccacaacctctcactgagatgcctgcattagcagcctaatctggtcttcctctatcctcaatgactctcctccttctgtttctttttcactctgcagagtgaccttttaaaaatgcaaatgcatcccttttccccttcccaacagatttgcatttctcttcaggaaacgacccaaatctctcacatggcattggctgagtgctcgggttctcactcagtcctctggccccatctcatccacccctctgagctctctatgcttcagtctcagtagccttgcagctctagggggtgccttctccaaccggcagttgagccataacaggctgttccctctgtttggaatgctcattccaccccaacgcctctgtggtaggctgaattatggtccccaaagatatccaggtcctaatctctgagacctttgaatgttaccttaaatgatatcagggattttgcagataaggataaagggactctcctgaaatggggagactgtgctggattatctgggtaggccccgagtgtaatcacaagcatccttataagagggaagcagagggacgtctgactcagaaggcagaaggcaatgtgacaatggaaacagagagatttgagaatgccatgacattggctttgaagatagaggaaggggccatgggcaagcaatgttctctagaagctggaaaaggtaaagaaacagattttcctcaggagctgctgagtggatgtggccctgcctatatcttggtttctgcccagtgaaacccattttggacttctggcctccagtaagagagcaggtttctgttgttttaacccacaaagtttgtggtaatttgttatagcccccagaggaaactaatacaatgacttcatgtttgagcaaatgctttgcactccccagagtaaaagaggagagccctgaccaagggtctagaacaataccacccaataaggtagccattggccacaggggactgctgagcactcgaaagctgcactttaactagggcaactggggtgaagctgtaagaaatttgggtgatttaaaaaagagtcatgtaaatccgttgggtctaggggagagcaatgcatttgcatttggtgggccctcccttgccgcagcttcagtaatggatgcatgatccaggtccggccaataatgatatcctatccttagggccacagtaattggcctgatggtctagtcctgagccggaccaatcagggtcctctccagagatttgatatgaccgctgggatggcgggctaccactctctccccaagacttgctgagctggggattagaaagactggaaccctctgtgacctggtgctcccttctccctctgcatagggggtgtgcgccacagcagagacagtaaggctgacacgcagagagaagaccgggactggcaggcatgggtatagagagagacactgccctgattacattttgggagttgctggtgtccctaaggccagatttacccaagatcacaagggtaaaggatcgcaagacccggagttgtaggagcccctttagccactacatggagtgagcttgccaggaatggagcacgcagagtaaggtgagtctggaagaccgggagaaagagctgacatcccgaagacggcttttgaaattccaggatccagtgtgcctgaggctagcctgacctctttgctgtcccaatcatgggaacaaataagatcccccttttttcttacatattttgagtttggctttttcactggaccagttgaattttattcatacaactagcaaagctactgtgcattatttgaaataagatttttaaaaatttacatttgcactaggaagagaaaaagaaattatttagagattcttgattaggcagtaggataaataacctattttacagcagccctgttaattactgcaataaatccaggccccagaaaatcaattgcctcctgttaagttccatttcatccatcctccccaccctcccattcctagggttcagttgtggtgacaaagaaggcacagggtctgtgatctcagtgacattttctccattattatttatttttaattgacaaataaaaattgtatatatttattgtgaacacagattttttttttttttgacggagtcttgctcttattgcccaggctggggagcagtggtgcaatctcagctcactgcaacctctgccttccagcttcaagctattctcctgcctcaccctcccaagtagctgttattattataggcacctgccaccacgtctggctaatttttttgtatttttagtaaagatgggttttcaccatgttggccaggctggtcttgaactcctgacctcaggtgatccgcccaccttgccctcccaaagtgttgagattacaggtgtgagccactgcgcccggccacaacatgatgttttgaaatatgtatacattgtggaatggctcaaaccaggtaattaatataatcattatctcacatacttaattttgtgatgagaatacttaaaatctactcttagcaattttcaaaaatgcagtacattgttgttaactatagtatccatgttgtacaacagactgttgaacttatccctcctgtctgcttatatgttgtatcctttgaccaccatctacccctagccccaacctctccagtctctggtaactagcattctactctctacttctatgagttcaacctttttagatttcacatgtaagtgcactcacatagtatttgtcttcctgtaccaggcttatttcacttaacataatgtcctctaggttcagccatattattgtgaatgacaggatttccttctttcttaaaactgaatagtattctgttgtgtatatatagtacatttccttttttttgaggtatatacatttaaaatatattttttattacgatagtaaaatatgctcattgaaaaaaaatacccaaacaacataggaggaaataaagtgaaaagtaaaaatatcccccttccccaaggcttctaagcttctttcagaactcaaggtctacgcttttagacttttgtatatagcatgttttctttatctatttattcattgatgaaggttgattccatgtcttggctattgtgaataatgctgcagtgaacgtgggagtatagataactctttgacatgatgattttatttcctttggaaatatacccagaaaggggattgctggataatatggtagttctattttcagtttcttaaggaatctccacattgtttttcatagtggctgtcctcatttacactcccaccaacaatgtttaaggattctcttttctccacattctcaccagcatctgttatcttttgtcttttgaatactagccattccaacagatgcaaggtgatagctcattgtggttttgatttgcatttgccttatgattagtaatatttagcattttttcatatacctattggccatttgtatgtctttatgtcttcttttgagaaaagtctattcaggaatctcagtgactttattgctttttatctttgtcctgctgatgatgacttggaaagttttaaaatataaaacctacaaggtggggattttttttgtctgttttgctccctgttatatatctagtgcctaaaagtgcctggcttataataagcactcaaaaaatatttttgaatgaatgaattaatgcatagcagcaacatttactttgcacctgttgtgttaagtatgttaagagatgcaagggaattgaagaagctaggaatggttcctgggccctcacagaaattacggattagttttcattcaaatcctttatttttaaatttattaaagactgatagcctgaacatcattgaatttgttcttttatatttggaaaatatgcttccaagagcatcggtgttcgtagagattctcacattatctggttcagggatttccttggatactgcgaatttgtaaggattaaatgctttaaaattatagactccttggaaagccccaagctgatcttataaagtacaaccacctttttgtttttaagcataggaagtagatgactgagagaataggatgatttaattacacatctggggtgaaaacatggcagtgtattctgtgttactcatggagcaaatataattcattcaagcaagccacggaaattgtgaatacaactaccataatgacttggtgatgatggctttctgaatgccaccagtcagtccaccttgggagactgatttgccagaggcctctcctttctatctgtgcttctgaactgggcttgaatcaaagccaacctactgccactgctctaacttgactgcattgtttatggtaatccacgtggaccctgaaacctggtcgtctgatgcactacatgcatgcacagactgagggcagccttctcagcatcagcacaacctctgcagtgagtactgctcataagatcagtgcagggagcagcagatgtttgctccaaccttctgcagtacatgtagtagcaatcgcagggctgaggctctgtgggcagagcccacgtgggcagtctcccaatttcctcctagggagaaatgcatacagaggcttagcaccacagttgggtgctgttcacttctgtctagttaaggagtcattattagccagaaaggaactatgatgtcagtttggtctttgtggatttcctgactcagtgtttatgaaggagacacattagtaatggtctaagatatctggtccaatttgtatcaaacaatagtcgtttctcattttccattgctgtggtaattttaatgcattctcctctgtgaggcagtggaaataaataccatggaggaagattcaaggagatggtgcttttttagtcttttttcccttctagcaacaggatgagggtgtaaaaaaggtcatggaccaaggcaatttggagaatcattattttcagagtctgtcctgtaatgacagagctgtggctttgtgtgctctatcttccccaaggatccagtgtccagagtcaggggtgtttctgagcctgagcactctgcagctctccgagagacctgcacaggagtgctgagatcctgctggcttccctttcttatctgtgaagtgaagatctgagagctgagccctgcctacgttcaaggggtgggagagtatctgtgaggcttttaggcctttgaaggcaggtgctgtaagagtgtgagataaaagtttccggagatgaaacagtgatcaggaggcctctggagggctgccatcactgcagctgattttcccctctctctcaccaagcccttgtcattcagtttgtggccaggtaaagacttaagttgaggcggggaacatggtactgtaatggcctgtgaggtctccttcctcatccctccactggggaaatgggaaagaagaaaggagagaaagaaggaaggtttgagggggagggaaggggaggtctttgatggcatctgttcctaagagctcaggaggagagaggcattaaagctgccaagtgccggctgcttccaggatgtctcatgctccttcaagcccttctgcagttgtggtcctctgagctagggctgcccttgtctccgtcctcacctggggactggtgaagctctcactggtattggcctggtggggggtcaggtgtcttggtcttggtgagtaccccgctgtagcacatggtgtcatcctgcaccattcattgtgtgtctgactctcccactaggctgaactctctaaggataggctgggatttatccatctttacaccacctcccccagttctgagtcccaagtgcctagcacagaacctgcctaagaagggagactgatggttcaagaggaacacccccatatcaagcccaagagagcgcctatgctccagcaatggaaggtcctctcggcacagccatgctgcagggtagagttggaacatgacaactgtgaatctggttaattttatatccaccccacatcctcttcatctccatgtctgtcgtttgtacagcttctgtactatacatctctttataggtgaagctacagtctcatttatattcacaggctgcgtttgtacttcctaacatccactcctctcccgcagcccaatactctgcacatagtaggtgcatctgacatgtctgtatactcgaagtttcctcagcctacatgagcctgggtggctgtgataggctgaataatggctcccagatatgttcacttcctgaaaacgtcatctttctaaggatcttgagatggggagattatcttggatgatctgagtgggcctgaggtaatcatagcagttcttataagaagagtgagtcagaggagaaggtgatgtggccacagctgcctaggtgggagtgatgaatatggaggaagaggccacaagccaaagaatatatgtggccactagtagccgaaaaaggcaagcaaatggattctcctctggagcctccagaaggaactggccctgccaacaccttggcttgagcccagtgagactgattttggatttctgacctccagacccgtaagagaataaatgttttaagccacaaagtttgtggttaatttgttacagcagcaataggatgctgtacagtggcacacctggtaccagtgctctggggcaacttcagaatggtacaaaagtcatgctgaactgaggaatggaggaaacaggtacagatggatctgctgacttgcagccttcttctggctcttaggacgaggggtactgtggccttccagctttgtgcctctctaggacttaaatgaaccactctggctggagtagttccttggtgaggatgcagctgctgggagtagccaacaatgcttcatggtgcctggggctccccaccttggggctcatccccctcttccttaaaatcacctgcagtgacacagaccagggtctagcttttggttcttccccaaaacacatttccagaaaacaggaactaatactcctagggaaaatgagcttccagataataactaccttaaaaacaataaattggacagctttagcattcaaaacagtcactgaacattagagcatgattaatatacccagagggataagggacaatattagtgatatgaaacaagttgagaagcaaaaaggaacaaaatggaaatatgtatgagaaatttagaaataaatagtgtggtgaagtgattaatactcagaagaatacagctgaaagtaagcttgtgagttagaatatcagattgaggccaggcatggtggcttatgcctgtaatcctaacattttgggaggccaaggtggcaggatcgcttgagctcaggagttagagaccatcctgggcaacatagtgagaacttgtctctacaaaaatgttaaaaaattaggtgtgcgggtgtgagcttgtggtctcagcaactggagaggctgagttgggaggatcgcttgagcccaggagggtgagcctgcagtgagtcatgttcatactagtgctctccaacctaagtgaccgagtaaaactctgtctcaaaaaaaaaaaaaaaaaaaaaaaaaaagaagaaaaacaaagaaagaaaaggaaagaatatcagattgagggactctcctagaagtttgcaggaaagggtcaagagataggaaattgagaagaaaagccaaagctaaggacacagatagaattagtggaaatatctattattcatctaataggagtcccagaaagaaaaatacaaaaaaaagaaaagaagaaatatttggagaaataatggagattaaataatggagattaacagatgcaattacagatgcaaaaacatattaaaagacccctagcaagataatgagaaccccacacctagatagattacagtgaaatatgggaacatcaaagacaatgaaaatagactatttattaagccataaaggaagtcaccataaagaccaaaggatgagtatgtagaacatagtatagactatgttttacaactataaaataatataggcctatttcactgttggatgtagatgcataatccttaaataaaacattagctaactaaatccaacaatgtttttataaacccatcatgatctcataggagtatgttgataaatgcaagaataacattaaatggatcatagcattaagaagagattttaaaggtataaacctggataaagtaagaaataggtgagatattcacaaaatacattttacataagtcaaaagcacatgcacacaaaacaccaatataccttttgcaggaacttatacaaacaaaaagaggcatgatgaacaagtcagagtggttgcctaggcatagggtgatagaaatagaagtggggactggggataaaaggatatagaaaagattgaaaggacaatctgagtgtagcatggaatactgaaactcagttattcctcctatcctctcccaagatagatctcctacatggccacggcactttgcaattcgtcttatgaagaggtggggtctactttccaattttttatatttcaccttgtgactgtctttgatcaggtttctttgtggaagttctgatactaagtctcaagatgccacatggcttctgctagtactgctgggaactctgaagccatcagatgatcatgcttgagcagcctttggatgttgaataactatgcggataatcgtacataaaacaattctcagcaaatgcaatagaactgaaattataccaaacacactctgagaccacagcacaataaaaataggagtcaagaataagaaaatcactcaaaaccatgcaattacatgggaattaaacaacatgcttctgaatgacttatgggtaaataatgaaattatttttctaaaaatacaaatcagatcctaactggttcttgcttaaaatcctctttgctaataggataaagtcaactcttttaccagggctctccaagcctcctgtgatctggatcctatcacctttctgccctcactcagctcccgtgaaatcttttaacatcgtatgcctccgtccctttatacacctgcctcactttgtgtttcttcttctggttctcccagcagattcctattcactcaccagcagtcagcttatgttcattcctctggcaagcctttcccacctctccttactgaaccattctgggtgccgcctcgaatctcacatctgttgtagtctctgtatgatggtgcttttcaactagacctaagcatcaacatcgtctgtgtgcagcttttaacatttaatgatccccggaccttattgctagggattaagttcaggagtttgtggagtagaaagtcctctgacatggaattgcttttctatgtgttggtttctttcaacagtggtgaagagcaaggattctggagcaagactgcttgaatttgaattctggctctgctacctggctgctgagtcatctctagtttttttcacattatctataaaacgagaataataacactaatgtcttaaatgtggtgaggattaagttagtaatacatgtaaatcccttagaacaatgcctggtaactattcaatacatatgaactattatttgctgttaccaaaagtgttcagagcagaaactgggttgtcaattctttgaattctaaggcctagcaccttgcctggctcatgggctggcatttagtaaaaggttgaggagctgaattaaaaattataattaatgtgggaagaaaattggaagataagatgggggtaacttcctgctttatcagaagttcttagcgcaataaaagtcagtagcccatctgatttttgtccaaagatgagcaccagcagactgatacggagtgaaaatagctccagctagataagatgcagaaatatggagaagaagctgggcagcctctggaagatttgttggaaaagcttttgtatttttccaaatatattgcttggtaaatgaaacactgaataaatataatatatattcatgttaagtagtggttttaaaaaattacatgattttatcagctttcatgttagtgctgaatgcagtcttagacatcttgactcttcagatctctgtttttccttatttataaatgaaggaaaattgcagtggtttctctaaagtcacgtgaccacttgtgccaaaatcaggacccgtgtcggtgctgggcccactacagcctgctgccgccgttgtaatgagctgtgattattatacaatccaatacattcccttctgtcaggcctgctcctcctctggttatgatcaatgacatcgctcctgtcctagctgccttgggttggttagtgttgaccagagcgcaaatctatcaagtgagaagagggaaacagagccgtttagtagaatgtgtaagtcagtgaagcaggaaaacatacatagattagcacatgagtgtgggaatgcaagcacaaaaccatggaaggctggtactctcttcagagtgagataagccaagaggacttttttttttttctctagcctgataagtaggcttaaattcttcacaaacagtagacttcagaaatagtatttccaggtgccctcagttgtggtaatttagttcatcataatatgttgatgtatattttaatgaactgtgttcagttttattctttccaagattataaagcacattgcctcatacatagaagcaggcaataagtgatatgttgaattgaattcaactgcactgcagagctgtggtccagcgccatcaaaaatcaaagaactagatagtttctctcaatggccctttcactcaaatttatctgtacaagtcagttgatttcattagtattaaatttcatgaaatgactggggataggtgtgcattttgattttctccagtttttgggaaacttctaggccatccctagctgcgtgaccttagcctgtgtttttttgtttgtttaactctggaagcctcatatttctcctctttgaaacaagggtaacaaaattggtagcacaagagggttgtatatgtattttttttctttttttttttttttttgagatggagtcttgctctgtcacccagggtggagtgcagtggcatgatctcagctcactgcaacctctgcttcccgggttcaagcgattctcctacctcagcctcctgagtagctgagactacagatgcaagccaccatgccagctaatttttgtatttttagtagggacagggtttcaccatgttggccaggctggtctcgaactcctaaccttaagtgatccgtccatctcagcctcccaaatgtatatgtatttctgagtggctgaatgcaccagtaaaacatctagcacacagcaaacactccaaatattttgctccctactgctatttcaccttttcccttacctttctttcttcctttcaaggatagcaaattatccttgcctcggacatttagattatctaaggaattattatttaatttctggggaagtagctaatcctgattaatacttctccctcagttccatctcatccttcttaatgcaagtggttacaggaatggaaagaaacctataagtggtcggttgttgcagcctccaaatagaagatggctattgtacgagtagaacgagtgtgcccttaattaagcactttgactgtaggcatcacctcctacataaaagatgagatctagacccgagatagagcgctgaaaaaggaagttagagtatgtaacaactaatttatttctgtagattttccatccactggcctgacaaggcagctgttcagaggctcctgctgcataaacaaaagccagagctttccagaaaggggctgctgaactgcacgccatgacttcctggatatattcctcaaattacataatattaaaaaaaaacatggcaagaaatgatgcggaatgggaagtggaaacatggcaataaggagttaagccactgaattcaggcaattcttattagtatttctggtgattttctgtacttaaattttgtctccaattaacatatgttaggagtagaatcctttttttttttttttttttttttttgagacagagtcttactctgtcacccaggctggagtccaaattgtgtggtttcggctcaatgcaacctctacctcccgggttcaagcaattctcctgcttcagcctcctgagtagctaggactacaggcacatgccaccacacccagctaatttttgtatttttagtagagacggggtttcactatgttggctaggctggtctcgaacttctgacctcatgatctgtccgcctcggcctcccaaagtgctgggattacagacgtgagtcactgcgcccggccagaatcacactttcataagtgatcctaacaaaggcctcatccaagaaggagttgaagggagaagtatcctgtgcctctagagggaaacaagtttgagtgtgttggcaagaggggtctccaagagactgaggaggcagtcctggagatggacgattgtggaggttaaagaaatgccttttttaaaaaaaagttccaagcttaaatatttttacgttatacatgcttaaggtaaaaatttaattcaggatagaggggaacttgatatccaaacctttaggagtaatgactcttaacaaattgataaacgtccttccagacatctttctgtgcatttatttatttaaaatatgtgcatataattttacataaatggtattatgcaacttgcatttttctcaaccatatatcttaacagatttctatggtcaaatgataaaggttttcgtcattatcgttaatggccccgttattatttaaagagtctcctttgattggctatgggaagcaatgctgtaatgaatatccttgggcatattcttttccatttgggtgataatcactttaggtaagtttctaaaaagttagtttattgggtcatttaacattttgatacatattatataaatttatgctttgatacatattatataaattatacttccacaagtgataacatgaatgcctgtgcctcacaccctaataggggttataaattccttgtcttttgtatatactgcaaatattttcctctaggttaattttttttcaattctttctaatgatgtggtgatgatttaaacttaaatttttcagtcttaatttctggtttggtggtggtggtggtgtgtgtgtgtgtgtgtgagagagagagagagagagagggagggagagaaagagagagagagatagagaaagagatgcttacttttattccctcagctatggaaatattctaccatatcattttatggtacttacttaattttatttttcaagtcttcaaatctttgagatatctggaatttattttaatacagagaaaggggtatggatctttttgtatttctcgcccccctccaaatatctacctaattttccaacaacatctttcattaaatgtatcatattttccccattgatattaaaattgatctttattttctacatgtttgaacctattatgagattgtttattgtttctattcagtttatcatttgacctattcctgcactagtgactcatttataaaattattattgttatgtattttaaatatatgacgggcaagttccctattgctgaccccacctccaatttttcttgtttctaagatggatattttttcatgtttttctgccagcaatctttcagaagcatttctgattgacttttggatcataccaaatttacagattaattaggagagcggagatctccataatattaatttttttatcgatcaatacctttcttgtttattcatattgtttttatgtctatcagtactgttttatgttttatatgttttttccatagagtcccatgcattgctcatgaagtttatttttagttattcagcaaagtgtaatgttttgtaccatgtcatgacagctactcaggaaccactttttccagagttttttcccctgttgacccaggttagggttggctacaagagaaacttgcatggactttggagtcagaaatgaatcaatagttgtcagtcagaggtggtgaaggacagatgcagaggtcctgatgggtttcagtttgtccttgtttctcccaatgccatatcttccttctctgtcctctgctgaccccactgacaagcagtgactccaggtgcctccagttcaccccattggcagtgactccaggtgcacccacagatatttccctgaagctcacacagtgacaaccatgaggaggcaccagccttccatggacttccgcaccagtccccctttgggttcctctgcagcagctgcgtgtgcctcacatcctgcaagctctgactcatgtacccacctcagggatagggagtgacttttctctgatccctttcag

SEQ ID NO: 479 - DNA, 20001 bp, Homo sapiens
tggtcacctgctctgttcttagtcatcctgagtcacctgttctgtaactgtccttcctgcaaaccactcaccccaccactctgactctctttaaaatagccaataggaattagcttagaccgtgtggtccagccctagccaataggggaacaacacagcagtaggcgctacctgcatcagggataagaaccccttcctctcccttgttcaggtgtgctctcaccattgctccatctatgagtcacacccttctatagaagtaaaattgccttgctgagaaaattaaatttatgttcgagtgctatttcttttacagcactgaaaatttatttctaacactatttttttaagaacaaggataaaattagcaacttccatagtatcacaatagcagattttatttatgagggttaatgacaggtaccaaaatcaaataagcaagcaggtttgctggggagaatttctcctggttttccttcctctgcaaatgtctttatttcatcttcattcctgaaggaaattttcagtggataaagaattctgtgttgacggttttctttcagcagttaacaaacgccatcccactgccactgactcatgggcctgtgaaagaaatctgcagttgtcagagttattgtttccataaaggacaagaaaggacaaccactaacacacgagagggaaaagaattttctccattctttctgacctgtagggcccctgtttcctgtctttcagactagaaacagagggcttgccttgggatttttctgtgcatagtcaatatgtaattccaggttttcagctgcctttgaggtcaaattggaagatactggagggaaaagaagaaagatgggtgtcgaatgagactcgctgctgatacaataattctttcagttccagcttcctcctccagtcagcctgttaccatccacttccaggaatcctgagggctgccccctgtctcctgtccagggcttccgtttcactcacttcttggagccccagaggaatgtacttacctagtcttgaccccagtcatgttttattttatttatttatttattttttaattaatttatttatttattttgagatggagtcctgctctgtcacccacgctggagtgcagtggcgtgatcttggctcactgcaacctccacctcctgggtttaagcaattctctgcctcagcctcccaagtagctgggattacaggtgtgcaccaccacgcccagctaatttttgtattttttagtaaagacagggtttcaccatcttggccaggctggtcttgaattcctgaccttgtgatccacttgctttagcctcccaaagtgctgggattacaggcgtgagccacggcacccagcccccaattgtatttccatagattcttctctgacacattgtaagttccatgagggcagagaccgcatttggcttattatcattcttattattcatcttctggccttagttcagtgttttttgcacaggagttaccccttaaaaattcactgaatcaatcaatcaatagcaaaccttaaattagatgacattttaaagcaacttacacaatgcttgcccataaagatgttcgatatcaataactgataacgtctattattgcctgcagagacttgaagcctgccaggtctaacttgtttagtttctaaccagttaacacagaggcatttgacacagagcgaagaactcctgcaagtcaataatctatgtaaacaagtgagacaccgctccagaaatgttatccacagccccaagaaaatcagcatttattgtgccaaatcttgtacataaaaatacaagaactgttttgcatacacacacaaatacaaacagtatctaaattgaaattcttgaaagtgtactttttccatttcttatattatttcagccaacagaaggaaacttacatctttcagggggaacccttagtaccgaatactttgaaaagatgatgcccattcttttctgcaaaaattatattgcagaacccctccctgccccaaggcagggcgtgcacgttgcacagctccaagaggattcccatgatagtcttctgtgaatggtgtggaaccaggctcaggcagtctgtgacctgtgcaacagcaatcacatctccagtccagccttcttcaccttttgccaaactaatgagtacctctcagtggtagaaactaaactggaaccattgccagagagcctgggaaatggagcttccagacttctaatccctgcaagaagacctcagaaggtcaggtagaggatggagcagcaacacactatctgctatgtttactgagacggtcatatcgtcggtctcttttaactgttattgcaggaaattacactgataggttccctaacctcgaaccatcttttcattcctaggaaaaatgtgatcttctagtacatcgcattcttgtatttgctcatgttttagttggaatttttttgtatcatttgcacaagtggggtggcgtatatattttctgcactagttatgtctggatttggtgtcagggtaatactagctttattgaatgagttggagatcatctttttatattctgtggaatagcttttataagtataatattaatatgaatgtcattattccttagaaatgcagaatatgcctgcacagcagtgtgggcctgtagtcctctgattacccttccatttttttctatgggttatccttctctttagacttttccccttctttagattttttctcctcttctgaattttagttaatctattcccaattatttctaaatagattttcattttctttctttcttttttttttttttttgagacggagtcttgctctttcacccaggctggagtgcagtggtgctatcttggctcactgcaagctctgcctcccgggttcacgccattctcctgcctcagcctcccgagtagctgggactacagccacccgccactgtgcccagctaattttttgtatttttagtagagacgggatttcaccttgttagccaggatggtctcgatctcctgacctcgtgatctgcccgcctcaacctcccaaagtgttcattttctttttaacccaagttatctagaattttttcaaatttgcaagtagatagattattttttaatatggcagagatatcatttgtcaatcccgactgcgatccttgactccttcctgctttagggaccaggccctctgttcagcatggcagtgcgtcctgctctcaggcctggctcctgcttcatttaaggtggaactcctgctctttttcgtcagatacttaatttcccggcctcccttgagattgttgtggctacgtggcctcatgtggcctctttcttcctgctttggctgtgaaaatacaacacctggagttaaaataaaacttagaaagtaagcacagactatgggctatgcctgagcttaactcctggctgtaccaattattagctgtatgactttggacaagttactgaatcgctctatgcctctattttcccatctgcaaatgaggaaaaattacacctagctcatggacagatgtgagcatgtaatgtataacaatacgtcaggggctcagaacaacaattggcacaaagcaagtcatacgaactatcattatctttataataataatagttattaatactagtataatcatcatcgtcatcttgggaccatgaggccaagacaatgagaatacagagcagaaggaacgggcttggattcttcatgaggatgttacacagagcctggaaaatgtacctctagacattcaataaacaatacatatcgttactttagctcctctgttaatttttattggatgtgttctaatcagtatgcctcattacgtttttcactaattcagaaattgatgccaggcactattctaggctttggggctatagccacggacaacaacaacgaaaaccctccgcctcttagcgccgacattctttggatactaatttctaattgtcttccgttgaagtcagagaaattagcctagtgaattctgccttggggacttggctgagattttgttcctaacaggatttttgtaaatattccacaggtgtttgaaaagaacacatacacacgctcttagtatatgaggagtgaagtctaggttcaggttttttttttttttttttttttttttttgagacggaatctcactctgttaccaggctggagtgcagtggcgccatctcggctcactgcaacctcccactcccgggttcaagcaattctcctgcctcagcctcccagtagctgggactacaggcatgtaccaccacgcccagctaatttttgtatttttagtagagatggggattcaccatattggccaggatggtctcgatctcttgaccttgtgacccacctgcgtcagtctcccaaagtgctgggattacaggcatgagccactgcgcccggcccaggttcattttttcacatatggatgtcccatttttccaataccattggttaaaccgactactgactattccgccattgaattgctgttgcatctttgtcaatccaaatggctgtatttctggaggagaggggaggaaaaagaaaaggcaaataacgaaaatgtgcaccagaaaaataccaagtgttgaccaaaatgtatggccaagatgtacccaagcaggactctccctcctggccgttgcaaactgtcatggccttggttgcatctgtctgttaaagattaacgagcccttggccttagcatgtcattcccaggtatgccctccagtagacacgctcacagacatgcaacaaaaagtgtaaactacaatattcccagcagcactgtttgtaatagccccaaactggaagctaactacgtgttcctcatcagtagagtagataaactgtagtacattcatgcattggattaccatataacaaccagaatgaaggattgaaaaccacaggcaagactgtggctaaatctgactaaatgactaaatgttgcaacaaaagaaacaggcgcgaagaaggcacatactgtgtagctccgtttatgtaaagtacaagaacaggcaaaactgctctgtatcattggagggcaggctagtgatttaccgtggtggggagcaggggagtggggcaatttcagaggttatgggatattctgtctcttgatctggatgccagttacacaggtgtgttccgtcaatgaaaaggcatcaagctgtacactcctatgcacttttctgcctatgtattatatttcaaagaaacgtttagaaaagagagagaacaggaaaggtagtacttctctggaagaaaatagctaaagaccttcacagtaagaataaaatcagccccatttttgcaaacaggggtgcaacacgcctgcctgctccataaacaagtgtcaaagccaagccctctggcaggccctccccacacagttatcattaagtttcaggttctagagggttacagaggttgctggcaatgaggcacagggcaggacgtgcctctcatgagcttaaaatcttgctaaaagagaggcccccccaccccatcgcaccctccaaagctgaaagcacaaggttccaagtaattcagggtccccgtggtaagtctcagctcagagtcacgggaattctgcttgaagacccacatgtttcctgcctaacacattgtcgtcatgagattgtctgcaccaggaggacacagctctttttaaaaccagtcatcttggaccgcaccactaaggcagtgtgtcgttaaggcaggctgtggacaccagagtggttgttaaggagccaggctaagaagagcttaatgtatatgtctgtctatagtattgacatttcgtgcaatttccagagcagcacagggcccctgcaaactcctattgggaggaaggaaattgtcttttttctttatgagagtggaaaattgttcattctctccaggagaagccacaggaattaatattctcaaaggcacggaaatggcctatagataggagttttgcctgcctcctctctcaatctctctctcattctttttctctctctccactgcccccttctctttctctctccttcctccctagttcagaatagggatggtgaaaaactaggcctgtatccttcaatattattagcagagatcagggacagagaaaactcccactcaccaccctagacccacacgtatgcatcaggaacattctagcttcagaggtggaaagcaggcattaaagagtgaggtgagactagggctataaagctttcaatcatcaagaattagttaactgggctgggtgtcatggctcgcacttgtaatcccagcactttaggaggccaaagtgggaggattgcttgagccaggagtttgagaccagcctgggcaatatagcaagaccccatgtctcaaaaataaataaataaatttttaaaaaaagatttagtaaactgtcaaagcacctagatatcaactttcttaataagccatgccatatagctgtcactttggaatcaggatgttaaataataatacatagttgttttaataaagattctcatttttgctataaaggaaaatatctagtattgccactagaaatacaccacagagtcaacttagaaccactgttcgagatgaggaacgatgcttaggcactgtctgcatttcctggtatcttgccctttctgtagcgaagtctgattgaattgacagaggcttaaataccgaaaatgccaaacaaagcatatgaaatagggacagtgtcctgacccctagctacactgtaaacaacgtgggagatgaaggggaggaagctacggagttcactggagggtgccgcccctggggccttccacctcacccccaccaggactctgagacgggagctgcccacctccactcacagacagggcagcccgagctgcgaagggttttgccagagagcagaactgagttagtggctgagagagtccacacttttggcctctaattctgaagccagtgtgcctgcctatgatatccccacccggctgtccccttagaaaatcagctggtatcaaataactcttcaggtgatccagacggttctggatccaacaggatccgcagaggcatgccgagaggcccagagccttggccgcccccgtgggagccggcctccgggaagacccgctccaccttctccttctgcccgacggctccagaccctcccaggcatccagagtccaagggtagctcttgttgacttcgttctagtaagagatcagtttgctgaaaataaatgaataaataataaataaataaataaaagctcattatccaaaagtgaacattttcaaaagcctcacaagtgggtctcacctccatgacttcttcagcactgcgcaccctctgcatggccgctgggccactctgatccctcccacggccgcagatggcggcaccaagggagttccctcttgaggagtctcagcccaagagcgagtgcagaaacgggaaaagtggcttgacagagaggaggagggaacagccaccagcaggcaccaagagtcctctcccagagccctgggaccctggagcccaggcctgcttcctttccgtcctcaccctgtagaggactcaagggggccttcaaagtcttctcgttgctccgttaaagctcaaggaaatacagtggaaaggggacaggtttggtttgatgtctgtgtcagtctcccagggatgccgtaattcacaaagcaccacagaccgtgtgccttacacagccgaagtgtactcgctcacagttccggaggctgcaagatccagactgcagtgtcagcaggactgcttctttctaagactgtgagggaggatctgtccctggcctctcccggcttctcctaactcactggtcatccttggccttccttggcttgtagaagcaccacgctgacctctgcctccatcctcaggtggcatccaccctgagtgcgggtctgtctccaaatttccccttttgataaggacctgtcctattggacgagggcctaccccattccagcatgacttcatcgtaactaattacctctgcaactacattacttctaagtaaagtgacactccaaggtcctgggaggtaggaccataacataaatctggggggaggaacacagttcaacccataataatatggaccgaagtccagcctgcaactcagccacttacaactcagccactttccttccttggagacaaactgcaactgcatctgcccacaccatgcttcctttggctgtgaaatgggaaggcagtggctgcttgtcatgattgtcataaacaatccaggagacacagaagcgcctctcaggtgtaccacatgcctgaggcttaccgtgtgctcacaatggtgtggatggcattgttctcattatcaggcagctctgccagtctctcccagcctgagagaggccatctcccggccccaggtataaacatcctttttccacacttcctgccagcatcagtgaccttcagaaaacccttaggggacaagcggagtgttgaagtgctgagagttgaagagctcaatccactgctccaatgcaacccggggccagagccggcttttctctttgacactttcctagtggcactggctgggcacatgcttgaaaggaagaagtcatctgcaaggagctctgggctgggctgcacacgctgaaaatgcatttatttgatttatttttacatccaatcttgttccagaaaggatttgaggggccacgtggtgaatcaaatccattgcaacttaatggctctccgcttcgcacttagtgggagggggctgaacaattggaaaatagaaataatcccaaactcccatctgatcccaaaggtggcatcttagacctgttgcacattgttaaaggcattttgtttttaagctacaaagctcagcgtgtcaaggtgatgaggacgatgatcatggcaatgatggtgatgacggaggtgttggctaacacgtgaaagctcgtcctctgatggaccaggtactgttcaaaggaaggaaaggaaagaaaatgagggggacaaggggaagagggaggggagaaaatggaacaaagggttggagaccgtgttagagacccacagtgtggccaaagcagtgtgctccttaccctctaaccaaatcaaatcccaggagaaagctcactcattctttcaaagttgtgacttatttcagagaacaatctgtggtcataggtggatcatgttagtcgttcacttccagaaagccaaatctggacctggctctcaccacgaggctctgatgacctctccatttggcccctgggaagcctttgccatattaaatgctgtcacctctgcagcgagcagatagggaggcgctgctccagggccatccccaaggatgccttggccagcttagggtgtgagacggcacctggaaaactgtaccagtgaggccagagggcatgcagctgcttcctcagtgcctggcatccgtcacacctgcagtgccccttccacatcagccacgtgtggcatcctacacggccacaagtgccacgtctgcaaccagtcacacttaagccctctggtgacccagaagaaaaagggagaaaagtggatgctaagctgctatttggtaaagagtgaatacgactgcactcaccacatggggttggggaggggctccgataaggtgcctgagtcacccaatgggcacttgtccatagccgcaaggatgtcctagcagggtgatcaccgggtgctctgttgagcaggttccagggtgacaactcctttggtttgctcacacatcggtagccactgctcctagcaaggccccccagccccacttcccatccagcacacactgctggcacccccactcagcccccggcactgcccctgaatttctctcatagctagctagctctccattggcaacgctggtgcctgtccctgccagcagccccaagtcagcaccatgcccggctgttcattattaaattgaaaaaaggaggagggtcctgccttgattcccttccaacaaagaggctccttggtggctatgcaaatgtgcccaccttctcctggaacttgctgtgcaaaccggctttgaaatttcagaggggccctgtgtcccttcccccaggggcttggctagcattccgtatcactgaggacttggcaggaaccatggaggaaggtcaggagcacctgctcccagtgcacatcctgccgagatggcccacgaaccagtcagcggctcttcttcagaagcaatctcaggtctgcctggcagtcacagccccacagtgaaatacgcaccacgtcccaactgtgcattcacatgtaattctcatctcattctaagtcttatctgattctcaccaaaaggctgagtcctgcttgccatctggggaaaccgaggcatggtgaatccaagtgacttgtcttctcatacatggagaaggtgaggttgaaaccagatccaggacactgcagagacccctctcatccctttgacctttccagaaaaggacctgcaagagataaagtagtttccgaaaggcctccaggcaggggaggggcctctgataatactcacagctcaaagttggtttggaacaaagccctcctggtgccatggcactggggcagcaaagcggggcagaaaatgatgggaggggagccgcctcccaaagggctgcaaactggggtgaattgaggctacttaatacattcaatccatcagagtaatgccttgtaattaagattcctggaaatgaagtagtaccggggcactccatggaagatctgccttcaaacggttcaggtcagccttaggctcaagcacggctctaattgacggctccccttgggtctgaaagaaaagatgtaatcagaccacacaaagcacgtcctgtccaattacaaggatcggcatggatgggctgacctgtgacctataaaacaaaattaagatttccaaacatcaccaggaggtagggggagagatggctcgtccgtgctccagccttccaactccccagagtggagacagaacaaaatcgtagccctggaaagaaatgtggtggactttgatcagccattgtgcaacctttcagttggagtctttctggggggtgggagggtcagggggactaatgctcagtttcttgcactggatgtccagatgcgttatcacaaaagagcatttctttgcagttgagccctagagtgccaggaagctagttctcgaaacaagccagaatctccaacagccataggacatgctaattacgtttgggggcagtgtggggatgcacttgatgtcatggtggaaaacacccccatactcacgccttatgggacctgcactctggagcatgaggccgactgcctgggttctggggtgagaacctatcaacagcaattgaggaatgtttatccattcttctgtctcctgactcagggagctgtgtttcatcttccaggaaagaactgggcgggcacattgcacttagcttattcaactatcagggacctccagcggtcgggaggttgaggaagagtcatggggcctcacaaagtctttgcagaaacaggcctttgcctccgcgccgccgagccaggagaacctgcagcgagcaactagctcttctttccttctcttttaaaatcaacacccgtccccagatttgcttttggcaaacattgcttaactgctgctgttttccctgaagtcactgaagagagagttagataatgagctggcatgctcttttgaaatgtttactgtgttccttaaagcaagggacatgctggttcctaaactaatttggggttgctagatcttttctactctttttggagatctccgaagtaaacacatggacttaagtataattatccgagagtcaaataaacagtcatggggctttctaaaggatgaacctttgcagatttgtcgatagaaattttttctcaattctcccaacagaaaggacagagaatgcatgagtattaagataatgcaccatagcacgccccaaagatttgaggataaaagatcaggttgtcttattttcagttcaaggaaaccaaaggtgatgacaggacctcaatggccatggcatatgggatagacccagatagttaaagaaaacttcctcaatgcaaactgttcttcataacggaattcacatttgaaaaatttctgagtttcaacctggcaggttgcaaagtcttgttaaaaaaaaaaaattaaagctcaaggcatccagtcatgtgtaatttcggtgagaactgtaataaatgcatccacgtaagccctaaattcccactgtcaaaatgaagatctagggttagcatgacatttatataaatcccacttggtattttggttgcatgtttttccaaaggagttcaaaggcatttatagacattctgattagtgcttgtgatatcccagtggggtggcaaattctattagctcagttttacatttgggaatagaaaatcttaaagcagccaaatggtttggcaaaaaccatatggcatgtcactgatagtgctttgagaagaaaacaggttttcccagcatctctccctgcttcagtcctctgtccaatttgcttgcaggatttttttttaatgttagataatgtcatggtgatttttagagtctatgtaaaatctcatctacatttgcagcctgctgggccaatgtccacctgtgcaggacagagtaaccttgagcccctcccttccatttgttgggaaggacagacctctctgaattgctccagccagctggaaagctgagcccccaagcaaataatgtcaagaagagacgataggagcccagaaagtaattccccaagccccttttcctctgcagaatgtttgcaggctccccgagcgtgaggcataatgacttcctccactcccagagtccaaacaagaagtggagaaggaagaacaagaagaaagacgtgggcttgttgtctagggcagatggtgtatcaggaacagatgtcagggatgaagaagacactcctcagctcctcgttggttgccatcatctcttcaagaagtacctcagactgcaaggaacagagtgagcagtggccaggggaagaggtgagcagtccaggactgccgcccaggggaggagggtgctatgctcccaggccacgtgattccattccaaggcatttcaagaccttgaagacaaaattgctcgactcagccagtagtaacatttgaggagttgctgtggccggaagaaggtgccaaaatattgccaccatgaggcaacattattacttgtgggcccagaagtgccctcccctgcaggctggctccatgaactgctctcctttcacctggttacacccacactgtctgtctgtcttttctttcctcattctgcccttcctgctcgggggcctttacatgctatgccgtctgccagaaacgcccttccccaccttgtgtgcacctgcctgtatccttcgaatgttcaaacatggcttcctcaaggaagccttctttcccgagcctcaatctggggtcaagcccactcattccaggctttgcagcctctcctgcaagtcaccggtggcaaatgagatgaaatcattggttgttatttagttgtgagttgggcgtctctaccagtggcagataaaccccatcgaggcagcaggctgagctttctcttattcatcgctgtcagcccagcatccatctatatttaacaaattaataaaataaatagctcatcagtctggtttgaagaaacagccacatgagcagtgtagaggaaggtgctgtagggtgaacttatgggtttatttcccacagccatgaaaacatttaacaccaagtcatatgattttgcctccttttctccatggcccaaatttcccattctaggacctcagtcttctgacctccactagccagcctctgctccaagaggaaaagggaatgacaaggctcagctcacgttttctgaataggaatggtctgctcccccttagtgtcattcctggagatcaaggagggtcccttctctaaagggctagctctttttctgctgggaaatagtgaatttgtgtggactttataatatttatttttaaaggtaaattttttccatggatttttgtaggctttgcttgtttggaagaaatcaattaggatttattatattttagccatgcttcaaaatacacaggagattaaaaatctaaactcctgataattgtattttataaaattaggactgcttatttaattatgaggaaaagtctccatcatcattaatatcattgtttataagcttttgggttttgttttcctctcaaacacagttccacgtttcccaatgggaacatctttaaaatatcattagaaacaaaggtgtcagccactcttcacagcttccgcagctgcttttatcaaatatccaggggcctgttttaaaagcagagaaattctccaaggaagaaatggcttggagatctgtcattgctactagaacataacaaccaatcttcataagcagtaaaaataattccaagagaagtaagcgacaggtaaactgggtcttaaaaagagacagaataagaggaaaggtaggaggcaggggaaggatggaagacggaggctggaaaggagccgcagaacggcacacaggttgctgagacgcgattgcactgaccagggtctggggagtctcaggtggtgtaatgtgtcatggagcttcttcttctttttttttgagacagagtcttgctgtgttgcccaggatggagtgcgatggtgcaatctcagctcactgcaacctccgcctcccgggttcaaggggttctccaccctcaacctccccagtagctgggattacaggcatgtaccaccatgctcagctaattttgttgttgttgtatttttggtagagatggggtttcaccatgttggccagactagtatcagactcctgggctgaagtaatttgtccgcttcggcctcccaaagtgctaggataataggcatgagccactgcacccagccacagagcttcttattaattatagaaattgtcctgaaactttgaaaccaatgggagtggggagttgggggacaggtaacaaattttgccatgataccattgacttaaaatcacgagatctatacatttagaaaagaggagttttattttttataaacgattacaacctgtaggctgttctgtttaacaacttgttaaatcaggaacaggcactttgaagaaggaacagtaaaagaggaaactatgctgaaggagctggctaagcgtacagatttagcaggttataggaggagctgggaagattcatgaagaggggctgtgtgcacgtgtagtaagcaaacatctttgttacatccatcaacacacacatgttcacctgggagtgaagacttcacatttaaatgttttacagttgggccctatatgtcgcaaggtgcagctgggactccaaggcactcagtgcacagtccccatggaccagccagaaccagtccctggagggtggtctcccatcaggggaaagttactgaaatcagtctcttgttcactcgaagctgtagttatggcttgcgggacagggatcagttagtcagcatctggtggagctgccattgttttaatattgcttatcttgaggtcaatgcttatttagctgttagaaaaaagacaaaacctcgtggcagtgagagcctcgtttattcttgaagcacagaggtgcgtgatttaacccttgcctgccacggcctccggtcttacttgcaatttggcatcctatcgtcagtctgattatctctagcgttcatgctggtcagttgttgtgtctaaactgcaaaaggcagggggtctggctgtaacgtcaggtgactggttgaaatcagcagtggagcaaatctttcaaaagggctggtttctgtttatctctttaaaaagaaactctaatggcggttagcgagggaggggctgtcttgaggtgtgcctgacctctcatccatcccatggccgggaactcagtttttaaggttctctgggggtctctttggccaagaggaggtccattcagtcagctggggggcttaggattttatttgtatttctcaatacaatcagatctttttcaattcccttccttaagcttgaatatcctttgaaaactccacaaacctaaaataatatgtgcactgaattcacgtatccaaaattatgagcttatgaaatttaaagatgcatttcgataatggtcacacacttataattcccatttgcttcaaatggttttaatttcatgacaaaaggcactggccatttacccagaggcagacacaaatctgagaagaggccattagcactcctataaaaaacaaatggaagccttctgttttcttgacttcatagttctacagtgtcaagcaaatgtggagctgtcattttcataccagaagccaagggggaaaaggacaaagggaaacccaaaactcatgcaacagattttcagcagcagggaaattaatctcattggactcctttgctcagctaccaagatgagcaacttatgcttcttcagtaagttcttttatcactttctcagattctagaagtggaagatatctgcccagattgagacaaactcctctcccctttcccatgttagtctcttttcgtatcatctgtgagttcccaaacaaggactgaatttctgccacctgctgccaaagatggtggcctgtgacatgcgtgaggaggcagggtctcctgggctagagcttagccatcgtcgtaagaggaaggtgggaactgactctcccatcctctgtgcgatggctaattgtatgtgtcaacttgagcaggccaagggctgcccggattaaacatcattattgggtgtgcctatgagagtgtttcaggatgaggtgagcatttgagtggattccgccaagcaaatcaccctccccagtgtgagtggacagcatctcaccccttgaggccctgaatgtaacgaaaggtggaggaagaaggaattcacctttctttctttcttcctacctgcctgcttgagctggaaaaaaaaagatcatctcatgttcttctgcccttggcctgggacttaacaccatcgtctaccctggttctcaggactttggctccaactgaactatagcacctggggctttcctggggctccagcttgcagaggcagatcatggggtttctcacctccataatcgtgcaagccaattcctcataataaggctcccacacacacacacacacacacacacacacacacacacgcacgcacatgagtcatgcactgaataatgtcatttcaatcaatgatagaccgcatgtactacagtggtctcacgagattatgataccatatttttaccgtatcttttctatgttcagatatgtgtagatacacaaatacttaccactggattacagctgcctgcagtattcagtacagtcacatgccgtatgtctttctagcctaggagcaaaaggtgctaccctctaggcctgtatgaatacactctttaatgtttgcacaacaaaatcacctaatgacacatacctcagaaggtattccatcatcaagccaggcatgactggatatatcccctggtggttctgtttctctggagaaccctaaggcactctgcctcggcctcatccccactttgccaaccggatcctccattccttatgtcttcactgatttcgtaaaatcacttctccgcaggtgatgaacaatctcctatggtcagtgtgatctttgaaacaggcaattctgtccatattggcccctactgaagatcctcccatagctcccaggatagagattgcatcctgagtgtgaccttcccccacaccttccagcctcatcccgtgtctcccccttccacctcctttgctgcagccacactgaatcagtttccaaagccgtcggctgtctacactgccatgtctgccaaccaagcaagcactcagggcttgctgggcattgtgatgggcactgggtacagcaatggctgcagggagttcacagttgagtaaatttaaagcaatgttgcagagtgctggactcagctccaatcaccccaaccctgggaaagtgccctgcccaccatcccccagccctgcttgaccgggagcccattcttttgtgttctcagaacaaagtttaaagattgcagtgcagatacttcacacccattagaatggctacgatcaaaaaacataaaagaagtattgaagagggcatggagaaactggaatctttgtgcattgctagtgggaatgtaaaatggtacagccactgtggagagcagtatggcacttcctcaaaatagttgacatataatataattattatatgatctagcaattccacttctggatagatagcaaaaagaacagaaaagaactcacatagatatatgtacacctgtgttcatagcagctttcttcacaacaaaaaggtagaaacaaccaagtgcccatcaacagatgaaagggtaaacaaaacgtggtacatccatacagtggaatattattcagccagaagattttgaatgctcccaatacaaagaaatggtaaatgtttgaggtgatagatatactagttacctcgcttttcattacacattgtatacacatatcgaaatatcacatctaccccataaatatgtacaattcttatgtgtcaattaaacatttgaagaaggaaggaaaatttgacacaatattacaacatgagtgaatcttaaagatgttattctaaataaaataagccacacacaagaggacaaatactgtactattccaagattaagaaagtagaatggtggttatcaggagctgggtggaaggtagaaattgggtgttcttgtttaatggggacatagttttaacttggaaggataaacatgttctagagtggatgatggtgatggttgcaccacaatgtgaatgtacataatgccacacaactgtacacataaaaatggctaagatagtaactttcatgttctgtatattttaccacaataaaaaaatatataggtaaaatttctttcttttcttttttttttttttgagacagagtcacccaggctggagtgcagtggtgcaatctcgactcactgccacctctgcctcctgggtttaagtgattctcccgcctcagcctcccgagtagcttggactacaggtgcccaccatcaggcctggctagtttttgtatttttattacagatgggatttcaccatgttggccagcctggtctcaaactcctggcctcaagtgatccacctgccttggcctcccgaagagctggaattacaggtgtgagccaccatgctctgtccataggcagaatttctgtttctgaccatgatgcagtcacaggaactagctttgccctcccacactaaacaaccaaacaaccagacaaaacaactataaaaaaaaaaaagacaatgatttttggacacagaacaacaggccacacagagcagagatcctttaaagaagggaaacaaatgggcaagccttaccacggtcctcacttaccacctagaaatcctttccaggctacgttccagggaaagctgacccaaacagagcctgctgttccctcaaaggaggagacagagctgagaacccagggaggcccaggcagctagaattgtagggcagagttcaacgaggcttcccctggagacttccatggagtactgatggatgtatgcctgcaagacaactaccaaggccaggaaactcccaccagaaaggaacaggcagaaaaatgtgtgagtctcagtgggccaggaacagattgtgttctcaccagtccaagtag

SEQ ID NO: 480 - DNA, 20001 bp, Homo sapiens
atgatttatattcctttgggcatatactcaataatgggattgctgggtcaaatggtatttctgcctccagatctttgcagaattgccacactatcttccgcgatggttgaactaatttacactaccaccaacagtgtaaaaccattcatttttctccgcagaagttgactgtctttatatgcttaagtcatttttatttctttttctcttcactttttgtgtctgctgtctatttgtctattgtgttgttgtctttttcttattgatttgtatttgatttttaaaattatttttatttatttttttgaaatggagttttgctcttgtcacccaggctggagtgcgatggcgcgatcttggctcactgcaacttctgcctcccgggttcgagcaactctcttgccttagcctcccaagtagctgggattacaggcgcctaccaccttgcctggctaatttttgtatttttagtagagatggggttttgccatgttggcctgggtggtcttgaactcctgacctcaggtgatccaccctccttggcctcccaaaatgctaggattacaggcgtgagccaccatgccaggccttgctgtttatgtattatggaaattagcatctgtcacatgctgtgaatactttccctcattttgtctttgtcactagctttttcactgcacaaaatttgttttatgtagtcaaatttattaatctttatgaattttggattttgtatcatgctccatgatatcactgttgcctgccttctccactctatcaggatgtttcttgtgcctacttgtttcaaacttacgtcacaaacacatttctccgtacttcccattgctttctgcatcacagatgtcctgctaacctcctgtttgacctgcagttctaattcagttgtctgcctcatcatttattcagtcatccattgatctattagttcattgattccacgttccctctgagttccaggcactgtgctgtgtgttaaggatacagtggtgcgtatctgtcctatgctcaggagctcatggaaagcatagccaggcttccacttaggtggaattcaaactaacagtccttggcaactgcagggagtgctgtgcgggaggacctggtgttctaccctggcctggggtgaggcagagggcgatcagggaagacttccttgagggaatgtgtccaaccctataacctgagtgggagtttgccagcctttcgtgagcaggtggcaggatgtcagtggaggaggaggaagagagctttccctattgagaaagctgcctagggaaagccttgcagtggacaggagctcaatgtgtttgagaaaccagtgaaggccagtgtggctggagcaggcctatgagaggaggtctcaagggacttggaggaatcaggttgtttgaattgttgaagagttgtgtatggcttggttatttgctccatgattctttgatttctctttatttatttattttttttagaggcagggtctcactctgtcacccagcctggagtgcagtagcacaatcatagctcactgcagcctcgaatttctggattcaagggctcatccttccttggcttctgagtagctgggactacaagcatgcatgcaccatcgtgcctggctaatttttaattttgttttgtagagacagggactaactattttgcccaggatggtctcagactcccaaccccaagtgatcctcccgccttggcctcccaaagtgttgggattaaaggcgtgagccactgtgcccaacccaattgtatgatttctcttttgtatacatcctctaatatttcagtagaattcccaacacattggttcaatggactttttaatcactttggctttctttcatttgcacagttttgtttcatctctcattgattatgagccacttgaggaaaaataccatcaagggctcttaggagggcgtctcccatgttggtgtacagcctgctagaggtctaggaatcctttctgaggagcacattcatcaatagcagtgtattaggagttatgggggacacatacaagtttcatctttagttttatctcctggtgattggtggtggctgctgagagagatcatgaggccaggtcagctagctgggactataagtgcgagccaccacacctgacctttttttttttgtagtcacaggatctcacaatgctgcccaggctggtcgtgaactcctggccccaagcagtccttctccctctgccttgtgaagattataggtgtgagacatgacacctggctgaaaggtgctatttcatcctgcccctaggtgtttgttggtataggtacatttgggcaagagtcataatcatagtactgtgtgtcatctggagccattctccttactgacatgagcttctagtcctagcccttgcctcaggatactgatgcctctgttttaggtcaggtttacttttttcctctgtaaaacggtactttcaaaaaacaccatgggggtgtgtgtgtgtgtgtgtgtgtctgtctgtctgtctgccaattggtgcagtggcctctgcatcctgagctatattttccccttgaaatgatcagggttaatagcatctgcaaaaatgtattgattaacatagtcatgaatcatttatgcaacaactggcaatgcaacggattgatttacagacttctgggtgtaggaggagcaccacacatctatggaccatcccctttcccactctcgcctctggtggcagcagatgcaccctggtccccaagagctcactggggaaggcaagtgttagagaggatgtagtgggatgagctcagggccaaacagcatttagagaaccattacaagccagccttggtcaggtagtcaaacttacttccaggatgtctggcaaagagccatcagttgctgctctagaaagtccacaacatggcctaatccagtagtggttatttaagggaaaacaggggcactggggagcagccagatcacatccttgctttttgcacatttggcagaatgtttaaagggagtgggggctattacacttctcccttgtggaaatatgccatatccttgttaagttgaagacagccttgtctgtaaagcttagtctatctgaaaggtcctttcctatccaaattccagtcagcctcattcccctctgtagatggaagtgcacctttatctgctgagattttattctaaacatgtcaacctttaaacattaaggagttggtgatctccttacctctgaccacttgcagcatttatttatcccatacagttcggtgcataatcagtcagcccatgttgtttacagcgtagcaagtgtaagagggaagtagggaggtaggtggggccaacattcatgtttaggttcaagcctgagaataaggatgagcacaaggctactgagaccatataaaacccctggaacaatgccttgtccagtaaatggcactctgcagagtcagtcctcttcaccctgccaagttcccctgtgtatgatatgcctggaccaggacagatgctcaggtgatcccaaggacctagggagggaagggtcccctggctgagcaggcctcaacagttggatccttctagcaacagctgtgctagcacatgctggactcggattaaagtcatacttcctactcttaatttcctgtttcttttgtacttaggatttaacaatacggttgtgatttagatgttgctatctgtaatagggcttttctttattgtttaaaagctaattagggaaaaagataattatatgtggttgtaaatatatgcattatatgtttatgcatatgtatacagtataattaggatcaaggataataaatgcctgacccctgtgccattactttttctcttgctgtcatggcagacatcgctagaagattatgacactttactatgtaccctaggaaaggcagccactgccaatcgattggagttgtcacatgtgataaaacctatttgtcagcctagataaaacctgttaatagattgatcctgggatacagaacatttgacctatctgagccagttgtttttttttgagatggagtcttgctctgttgcccaggctggagtgcagtggcatgatctcagctcactgcaccctccgcctcctgggttcaagtgattatcctgcctcagcctcccaagtagctgggactacaggtacccaccaccacgcccggctaatttttgtatttttagtagagacagggtttagtcatgttggccaggctggtctcgagctcctgacctcaggtgatctgcccgccttggcctcccaaagtgcttggattacaggtgtgagccaccgtgcgcctatcttagccagtttttatggattgggtcagcatgccaccagcctctggaagccccacagtgagaataaatgtttatttctggtgaatggccagtcagtgactctctgattgtgaaagcctctgactagtgttagactttttccctttgggtatgcattgtcctttgtgaacattgagacttttggccttcattccagtgagcttacaatttcgaaagttgatttggcttgcagtcagaggccattaattaggggcaagaagatgtttggtgtttctgtatttcagctgtctctgggttaaccagggtcagggtttttctagggacaggaactccctgtgctgaaacaggggcgatgataccatgcaaggcaggactcccagggcagtgactggattttagacagggcaggataacctggatggtctcttcatttacttggtttaggcacgtttgtatttactcattttacagatgttcatgaagaacccgccatgtgctggacactgctgtctatcccaggttcgttttataccttggctaacctgtctcctcgatctcgtggtcttcctgtctttcaagtctcagtttgggcctctcacgaacttgattctttctgcctctcagagggagaatgtaacttaatgttagcatttaattaatgctgagttgaaacattgatttatggtatgacttacctctttaaactccttgcatttaagattgagatagagaccaaattgtccctaattcttacatatcttccccctctcctttcttaagtatatggtacaggtttcattcattgggagaacagcactgtgaacttggcaagagcacggtcctggctgcagatcggtaaatacaaccaaatggcagagcattttttctgtaatagactcctaacctaacgggtggggtggtgtttgtgccaaacgtcagggaggacggtgctgactgtcctcactgtcctcctctgctttggtgaatgtttccatggcaacctctcttgctgttctcttatacccctatccctgtcttgcccttggctgtggcctcctggatccccgcagcaggaattattgaccgtcctacttttacttaggattgatacctcccttctaaagtagagctgtcatggaaagcagcatgtgataccagtgtacatctcttatcccttcaaaagtttagctccttgaggcagtttcaaccattttttatatcctccctgtgtggtgctcagcaaatactgaaagcacgaatgactgtgacagcaaatactgctctgaaggaagcagtctataaaacaggctatttctatcctggaaaacggcctgtggaaacaaagccaggttctggttatagtcacattggtatataatacatagctggttcatcaggtgctttatccatctcctgctcacttcacattcatgctctgggacagcgtttcctgatgaagctcatttcctagtgaaaatccatcgaactaatgatgggtcagatgtgggtaagtgtaacgtggttccagtacaagcagagatggattggtcatgaagattagctttagggcccctcacatggagggatcccttccaaggccctgtgctcatttgtattatttacttatctaatatttttgagacaccgtcttgctctgtcacccaggctggagtgcagtggcacaatcatagctcactgcagcctcgaactcctgggctcacgtgatgtctgtgcttcagcctcctgagtagctgggagtacagccacatgcaaccatgcctggctttttaacttgtgtgagcttcatgtgaatccacccctgaatacatgtaaacagaaaacactgaggtaaactaaagatagaagaaaccaagatattatttcctactctctttcacagtcactcaacaatcctgactccattgtctgttggggcgggaggacgttccccacacaaagcaattctccggcagattcttcagtggacagcaactggatgtcctctaatttaactcaatttttacaccatctacctggagatatagggtcagatcccataggttgagggtttagccccacaagattgcccacttcagatgccagtccccactgctgggaaagggagaggggccagaggttaaattgatcagcaatggccaatgatgtgatcagtcatgcctatttaatgaggcctctattaacaacatgaaggactgggttcagacaagcttccagatggataaacacgtggaggtttgtggcgggtggtgtgcccccctagagggcatggaagcttcacaccccttccctcatacctcgccctaagcatctcttctatctggctgtccatctttatgcttggtaatgttgttaataataaaagggtaaaggtaagtgaagtgtttcctttagtgctgtgagttgttctaacaaattaagtgaacctaaggatggggtcatgggaaccctgatgtatagcctgttggtcagaacacaggtcacaacctgaggcttgtaggggacagtcttgtggaactgagcccgccaccccgacaccatgtccaggtggatagtgtcagaactgagttaaattagaggatgtggcctggtgtgttgcctcatgcctgtaatcccagcacttgggaaggccgaggtgagtggatcacctgaggtcagggttccagactagcctggccaacatggtgaaaccccgtctctactaaaagtacaaaaattagctggtgtggtggtgcgtgcctgtaatcccagctactcgggaggctgaggtaagagaatcgcttgaacctgggaggtggaggttgcagtgagccgagactacgcagttgcactccagctggggcacagagtgagactctgtctcagaaaaaaaaaaaaaaaaaaaaaaattagaggatgtccagctggtgtctgctggagagtcacctgggaaactgcttggttgctgtgtgaggttgctgtgggaggagaaatccccatacattttggtgaccaaaagtgtagtattgagtgtactgtgtgagataatagaaaaaaaaaatttgttttttctttctctatattttaatacccaaccttcaaaataaaatcaaaacagaaacattttgctgctgtaacaaattactacacatttagtagcttaaagcaacacacatttattaacttaggttctagagttcagaagtcctaaactcaaggtgtcagcagggctgtgattttcctggcggctctaggagagaatccatttctttgctttttccagcttcttgaggccgcctgcagttcttggcctagtggtcctatcttccgtcttccgagccagcagtgccacatcttctaagctctctctcacctgtccttccactgtcccacctcctgtcttctgactttggtcctcctacctcccctcttttcaggacctttgtgattacacgaggtgcacctggataatccagactaatctccccatctcaagatcctcctcaatcatgtttgcaaagttccttttgccatgtaagataccattcacaggttctgaggattggggtgtgaatattgttggggggccattgttcagactactgtagttataattttaatattaaatttgttatattctttggcaatccagcttaataaatgccttctgttatctcttctgatagcagtgtttggtttttgtgcccttcctgcttccttaactggttctaatataaaactttaatttgttttatcaccattaacaatttctgttggacactgacattaattggcaaaagttctgcatctttgttataatactaacacttgggcaataggaacgtattttgggctatgaatgagctttttattaaagctgtaaaggaagatttcttttcctcttcatcaatttgtattcccagctacctcaaaggaggcccaatcaacgtctattaaaattcctgaacttcaaactttagattaaaggagcattggaaagagattagatgagagtagggtatggacattcctccctcattttccctgatttcacctgctgattagagaatctgagattcagtctgtagggtgtgtataaaatgggagtctgagccagatgcagtggttcatgcttataatcccagcactttgggaggcagaggacagaggattgcttgagcccatgaatttgagatcaaccttggtaacggcgaaaccctatctctacagaaaacaaaaaattagccaggcatggtgatatgtggctgtagtcctagctacttgggacgttgaggtgggaggatcccttgagcccatggcagtgagccatgattgtgccactctgctcctgcctgggtgacagagcaagaccctgtctcaaaacaaataaaggggagaatctgttttctagcagttcattgatgttagcagtttaccatccagtcaagaacctttattgagcacctaccgatgtgagccttggagggattttaatagctaatggtggggtggagccgtttgaacctataaagaagtctgagaagccagagagggagaaggcaggccagggaaatattgaggaggagggtgaggctagtaattctggatgctgcttagagggcaggacgaggagatctgagaaatgggccttggtcttcaatgatgtgaggtcactggtctccatggaggtgacaaatcccatgtggaccatatcttcagatgacttcattctctggatgcagtggtttgaatcttatgtaagaagtaagttccatgaagcggcataggcctttgtcttggagcttttgtgaattcccaaatttgtgaatactcccatagcatataacttaacctataaaatggaataatgtagactttgaagattttgaattggtccatatgtctgctttctaaagaaccctcatttcttagtccttttgcctttgtctccatttccggcaccagcacaaggctgttagtaactggtgctgtcagtggttcttcaccgcacggtcctgactcactcttgtgtcatgaacaatggtgaggcgtgttggagtcatttgcttctaattactggctaaggctctaaactttttggatgacttactagaaaaaggcagcaaggcaactattgtattactgtttttcccatgtatgtattccaaagtgctttactgagtgcggcaggaggggtagaagcagagccagctgctgctagggtgcatatggtgttggatgctgacaaaggcatgtggggttgtgcagcattgcctgtcatctgcagtgttggtgcatgtgtatgtttgggggttggttgagagccactgggccttactgatgaactaaaagtacaaagaaccactatgctttaacaaaattacagttattatgtatcataaccatggagttaccaggcaaatgcccagtgtcagctatccaggtcaagttctgggcaagagagagaataccaggcttggggatatcaggggtcagggaggccttactggcagaattgatctttaagatagaactggagctgttgaaatgcccaggctgcagcacctgcaggtgtgacccagctgactccaggccttcagagcagtcgttcttatccctgccagtggataggaatcacctgtggctttacagtgacctccacctccacctttggaggtcttgaatctgtattagcaaataacaactccctttctcctgcccccaagcaactctaatgtatatgctatatacgttagagtttatctcatgatacttttatgctggtggaggaataagaggtatcacagtgtcatcattggaactctttagaaacaaacagtgactcacatgcataatacactggtgcacacacacacccttaagtagcatttgtttgaatataatcaggccttacatagtgtataagtaaacataaatgtagctgtttgagaagtaaaatgctgaaactattaatgtgatgttccaataaaaagtcagtcaagcgtcttattcagctatacaaattacagatgtcagtattagatttttttttttttgagggtgggtgttgggggagacagggtcttgctctgtcaccgaggatggagtgcaatggcctgatcacagttcactgcaccctcgacttcctgggctcaaagaatcctttcacctcagcctcccaagtatctggaactacaggcacatgccaccactcacagctaatttttaaatttctagtagagatgagggctcactgtgttgcctaggctgatcttgaactcctgggctcaagggatcctcccaaagtgctgggattacaggcatgagccatcgcctactggccctttcttgatattcttgatactgagctctgtagtcttttttttttgtataaatttatttttatttttatttttttgagacagagtctcactgtcgcccgggctggagtgcagtggctcgatctccactcactgcaagctccgcctcccgggttcacgtcattctcctggctcagcctctagagtagctgagactacaggcgcccgccaccacgccccgctaattttttggtagagacagggtttcaccgtgttagccaggatggtctggatctcctgacctcgtcatccgcccgtctccccaaagtgctgggatcacaggtgcgagccaccgcgcccggcttaagctctgtagtcttaaactcctaataagcatctggaatcttctgagcgcttaactcccattttagcagagcttgggtcttctttttgtattttaattccttgtaattggtatgcctctgtcctactgcctgtggtattcagatcactagactaccttagattcctttacctgctggaaaaccagctggagtctagaagagtgcttacttaaatcacagaaggaacattagctagtgagtcagacgacttgggttctagtcatggttctactgttgacttttttgtgactttggatgatccgttttacatctctggacttcagttttcttatataaaaaaatgaatggaactttacctgatcgctgtgattttaaacatttttttgtattctaagacacatctgtgatttttaccgttgggtctaatactttcaaatcaaacaatgtattcagtatctctacaagggctggactgggggctgtagggtattcaaagacatgtaagttgtgcttctagctcaaatgaatattctacttaagataatatgtaaatacacacagagctaaagaacacaagattaaataaccattcaaaccggacaaggcataattagttgttagatgaatggaatagatcagcatttcccaaactctaacgtggatcatcagttctgcaagaagttaatagggcttcctgaacaaatgggtttttaggtcagtggagtttagaaaatgttgggtcaaacaaaatcaaacagtttatttgttaaaggcttcttggggcctttaataaattaatctccataatgaacgcatagctgcataatctttggtttcccagactttgttcaagaagcctatatttatttatttatttgtttatttatttatttaattaggaactattcactacttgaatgaatgcaacttgggaagctggtattagtgctaagtgtgttaggagtttaaggtgagagaggtagtttcgacctggatggccaaggaaagttttacgaggtagtgggtccagaacgtcggggtgggttgcacagtgggagaggctgggaggagcacttggaaacagcatgtggctgagctgtgagacaagtgaatggaatggagtggtggatgcttcacacttcaaaatctctgaggctcagtctttctcctggaagtgctccttggacagagttaactttacttttttttttttttttttgagatggagtctcgctctgtcgcccaggctggagtgcaatggcgcgatcttgctcactgcaagctccgcctcctgggttcacgccattctcctgcctcagcctcctgagtagctgggactgtgggcacccgccaccacgcccggctaattttttgtatttttagtagagacagggtttcactgagttagccaggatggtctcgatctcctgaccccgtgatctgcccgccttggcctcccaaagtgctaggattagcccggcccagagttaacttttctccagagttccatatccccagaggctatgaagggtgctcggccccgccccactcactcttgtgcatttctggttttgttcctgctatgtcccattacaagccaattcgtaggcttgctcagtctgacaggctacaaatgaggtgctcgtgacaccagaatagaacttggctattcctcactgtgagtgggccaggactgagcttccaaaggctggccaagggctggctgccactgatgcagaatcctcccaggaggagcccaggaatctgtatttccaacaggccccaacgccttggatttaggagacgaacttggagcagaagcagcatggctctgactgggcccagggagcctgcatagtgcctccttacattagatttcactggatcctctcagttgtcctggggaaggcttgggtgatctatgtgctatccgctgcagtccacagcactgaggagtgacaggattcccagtcagggcctaattccgtatagctgctcttgaacaagtacatcccaatgctttacagagttaggtagcagttattgagtcactcatttgcaaatgtagttatagaaatgcatgatcatattagaaggatccagggaggaaagagttaggcttgtactgggcaggctgaatgagcttcacttctggattcggtttattctgttgtgtgtttgctcctcctccagtaccctctctgtcatgtgctgcttttctaaaacctgtgtggaattatttattacagagagataccgggtttattatttgtaagggcgagaacacttgacatgcagggggagggaaagacattgacgttgtaatcctgtggtgtagcttatttttaatcacagagagaaatgctgaggtttgttttaactgagatacaaaatgttagaaataagctttggttgttaggaatagtaattcacagagcggtctctagattcactatgttagcccaaatctgaggcaagcaagttcttttaaagcccaacatcagaactcatgtactgacctagtttaaaatgttaaaagtgcagctcatcccatcaggaggaaactactatagagcgtgctcttcgagtttcttctttatttgtctagggggcttcttttttcctcagagagagggcattagttgcataattttgcagggcaactggcttcttattccttttgcactccttagtggtgtctcagctttgcagttttagggggaaatgagctttgatgtgtagtaaaaatgataactgattttaatataaaatagtgaatgctgggtattaaactcttgggcagcaggagacataacgtgtcagagagcattagttttcaaaacctgaaatgaagtggcttaactcgtcaacagaagccctggcgatgcagcaagtcttaagaggaggggacccaaatggattggtgagtggtatggggaggggtgtctggggctataattcctccatgcgtaggtcttgaaaagtcttctgcatgacccagatcttttgtttctaggggagggtctttgtcagagtttggtcctgatgctgaagagctttcttcctgttcctctctcctctgctaagatccttggggctgcagtagttgcttcatagcccagtagatgagctagctggcagagggcaggaaagtttacacattcctgtgcagcaccttttgcatcaggactgctctagtgttgagaatcactgtcctccgagtgccaaattctcctttaaaaacaggctgggtatggtggctcaccttgtaatcccagcactttgggaggccgagacaggagggttgcttgagcccaggagttaaaaaaataaaaataaaaattgctggacatggcctgtagtcccagcgacttgggaggctgaagtgggaggactgcttgagcccaaggagattgaggctgcagtgagctatgatcaagccactccatcccagtttgggtgacagagccaaaccctgtctgagaaaacaacaacaaaaccttggccaaagctatgcagagaaaggacaagagaaagttggcaggtagccatatttccaggcttagcattcacaatgaaaagtgcatggttccatgattttctgtctttattttctgaaatcatgactactcccttgcttccttcttgctgtttcttgtctgtcctggttgtaaaagaatttgggctcctggtggaattctgccactgtcactctcttcctcacaaaccttcagtagctctcagttgcccccgtacctggaccccaacttactttcctaatgttttctgccgtctcctgcagaatctctcctctggcttccaggctctctcagcttccaggccggcctctcagtgtgtgtctcagtagagtcttcaccttgtggcttttactcatactccttgcctgaaacgttcttctcccaccaaccactagatcctacccttggatggagcatgagcggggaattgctgttgcttgtgcactggagtgtgatacctgaagccgagccaggaggcaaatccagaagctgatggtgtatccgagtcaccgtgtttgtagaaagcttatcctttagttaactcgggcacgagtttaacttgtatgtaaatacatattcaacatagatagtcgcctgtaggagatacagttggggattcagcttttttttaacctaccatctgtgagtatagccctacatcattaagtggcccccatcgtgtatgtatgtatgtatgtatgtatgtatgtatgtatgtgtgtgtgtgtgtgtgtgtgtgtgtctgtgtgtgtgtgtgtttgagacagggtctgactttgacatctgggctggagtgcggtggcatgaacgctgatcactgcaactttcacctcttgggctcaagatatcctcctgccttagcctcctgagtagctgagtactagctcctgtgtgctactatgcctagctagctaattttttagagatgagatcttgcaatattgcccaggctggtctcgaactcctgggctcaagctgtccttctacctcagcctcctaaagtgttgggattataggcatgagctaccatgcctggtccatatatctatatatatatttagctcaaatgttgtttctccgtttttgttcttttaatgtatggtctgaggatccctgcctttacagttgcctggagttctctctctttttttttttttggtagagatgaggtcttgctatgttgcccaggctggtcttgaactcctggcctcaagtgattgtcctaccttggcctctgagagtgctttagtggattataggtgtgagccactgtgcctgacctgcctggttcttgctaaatttgaagattcctgggcactactgcagacccagagcagagtccaggagggaccagggcacactgatgtgattctaagggccgtgtgcaccacagccccactgctagccccatgtgtctgcagactgccccatgtgtctagggcgtggtgtgaggggctagttgtggcagtctcgccaggtcagggttgggtgggcaagtaagggctgctgaggagaatctggattcttaagaggggttggctgggctgggcacagtggctcacacttgtaatcccagcactttgggaggccgaggcgggtgaatcacaaggtcaggagatctagaccatcctggctaacatgggtgaaaccccgtctctactaaaaatacaaaaaattagctaggcatggtggtgcgtgcctgtagtcccagttactcaggaggcggaggcaggaggaacgcttaaacccagaggcggaggttgcagtgagccgagattgtgccattgcgatccagcctgggcgacagagtgagactccgtctcaaaaaaagaaaagaggaattggctccacaaccctgattacctggccagggatagaccagaactgtggtgagggagcctttgctgctgtcctcaagtagcttttgggccttgcagaggtccatgggcttcacgaatgctttctgcctttgactctgttttctcttttgatggtacatatcaagccgctagagtgccccaagtcttgttttgtgtcaaacaccctccaaggcagacgacctgcagttttagatcgtatatttatgtgacctgatgcctgctttggggtctccagagtcaaaaggggtgtgtgtgtgtgtacgtgttgatattcttgggcaaagggtgattgtaactgcagagaccatgcatcctccagccccgaggctttcctgtcgcctgtggagacaagcttcattgcctgtggggttctggtcctggatcatttcttagagctgagcatggggtgatgccaaggcccttgggacgcaccaagggtgaaagaacagtggggttgtgagggtgcttctgcagggagccctgaggcctagacagacaggagccaggagggcttgcgaaaagtccgtcctagctgcaaacctgctcctccctccgccctggctttccttgcatttcatttgtatcctgctgatttgatttccttttgcattgtgtaaggttcttagtagatacctattccgtgaagttagagatgaattagacacaagagagagaaagacctggctaaactggaaatgagaaggacgtcgacagtttaaaaacacattatggtaaaaataaacataacacgaaatttactactttaaccatttgtaagtgtatagttgagtggcatgaagtacattcacattgctgggcagcatcaccaccatccatctccagaactctttcatcttgtaaaactgaaactgcccattactgcttatcctccttccctccagcccttggcaaccaccagtctactttgtctttgtgatttttgactactctaggtacctcaatcagtggaatcataccgcatttgttttctaagttcacatttttctgtgtcgatactttaagtccaataagttaagaggagaagggacttaacttgcctctcctttggagacagtcctcctgctcccttctgcctgtccttgttgcccagagtggcggggccagtgtactgctttacctaatcctctgtgtagaatggactggcagctgggggctctcgaagtttgcttccagctgttcttgggatttagtgttttccctggaatgaagatgaagcagggttgccagataaaatgcaggctgcccaggtgaattaaatctcagataaacagtctatcatttatagtataagtatcttccaaagactgcatgggaaatacttatactgcagaattatctgtggtttacctgaaattcaagtttaactagatttgctgcatttttgctgctaaatttgggtgatccagtggtgaacacacaataaagcagctcattggtaaaagggcatgcggttggctagaaagattttgggagatgggcagatttgatggtgcagagagagaggccatttggcattgtcaacctattttttttttttttttggtagaatattaacttggatcctaaaagtaggattggaaagtagctgcatagactcctgtcatttgttcttcagagaaacaagcagctagtactggctaatgagaatatgatctgcacatggcaggtgccaaaagtgtgctctaatacaaggccctttcttcctttgcaggtgctgggctacctgactgctagcagggactgagggagggcatttcttgaagagttacccagatccagctgcttatctgcccctggccatggtttatgttgttgactgattgcaccagctgctgagaggtggttttatgtagtgtgagtaattgaaacttggttctaagtttccctcttgtcccttcctgtttaatgcagtcagctgtcctcgaatttattttttggtggtactttgaatcagccccctgtgtgagaattcaacaaaaacgcaactgatacaaagcatctgcactgagtaagtccgggcagcattgaatccctctctctgtgttttctgtgtggctgtttttcacttaccttctcccctttgggtctaggttcctgtggctggtttgctttctcctcagtgttttggaggacataaaatgatagttctcagggtttgcaaacagtgtgagcccttcctgcagctgccggtgggtaggtggataaaatcagttttgctgctattgtccacgggccaggcccacccccaggtgccagtggctgacccctggccacctgtgcgggagtgtgagtggctgcctgctgcaagggcccctgtggctcagaggagacgggcacacgctatgctcccttcagagcagtggtagacatgctttattttggggttttgaagccctagcatttagtggctcattttggcctttttcttcccctaagggattctgtgatgtttaatgactcaactctgattgtactccggatgtttcttttccactgatgtcagtttatagagcagtcctccagcaaatgtttgtgtgggcaggaggcagaaagggaaggaagaggtgagggggcacttcgggaccccaagaataggcttcaactgctgccccacacaccagggaggccaggccctgacattttaatgcccagtgcttttgcttccagacccattggaggggtctggttggggcttggatgaatgggacctgagagccgtctcctgcagggctgctggttctctgtgagaactttgggatgccaggtggggcaccgtcatggggtatgggattatttgtaggtctggtcattaggggtgggatgtctggcagatgccttagagcaagtgtatcaagaagtggggtacagcacaggaccctgtgccccatccttccgtgagtccccttctggcttgtctccataggacttcagcttaacacagggagtgagggagagggcaagagcatgggcaagagggagggtttagttttgagcagatagatccagctcctagtttgccttagaccctggaacactggcttctttcattcggccctttagaggagtggcccagagtagcctagcagggactgaactctttcggatggcttccagagcattgttcccaagaccctcccttctgctgaccctgtgacatcggggcaggtggggagagaagaggtagacactatcattcccccagtcccaggtccctccacacagcttattcctcacttttcctccccccggggggctgacagaatcaaacttgtgaaatactgaacactggggttttgtggtgggcagttatgtctgttactaagcacaaggaatttgagcaaaggagggagaaaaataaataactatttttaaagggaaccattgtattcaatggactcctcctttttgagggtctgtcgtgggcaaaagattgtggtgcctcctgagagtgatacagaggcagtgagtccccgactcttcctgcaggagtgtgtaggtcagcaatattgcagtttccagg

SEQ ID NO: 481 - DNA, 20001 bp, Homo sapiens
ggacaatcatgtttttactttacttcatggacctcatacccacattctcccttctcctatgctgaaaatcccaattctaaataattccaatgtaattactaatttgctatatcccacacaacacacaatcagcctcagagtaattatacaaaaactgtgataacaatatggctaatgaaaacatttcaattttttttctctttgtccttcagatatatcccactaaggatgtacagtcaaattattgtgttatagaattacttggaatcattcctctgtgtgtacctatactaccaactgtttatatagttaggttcacttgctttattttgctttaaatttttaataattcatctttaaattaaatttaatttatcgttataaaaatatttgcatgattgcaaagtcaaaatgacaaaacaagagctattcaaagtccagcatcccctcatttccctctcttttcctataaataaccatttaaatatatgatttatcctttccctttttatataagaaaatgggttgacatatttttctccactgtgtcattcttacttggtatatcctgcccggtgatgacctcatggtgacaaatacaagtctctgtattgggcttctggctctaagtaccaaataaggacagccaacgagtgtttaataggaacctgcagattctcactcctctctctcatatgccacagctggtctgtcaggatataacttcaactccaaattctgaccccttcttaccacctcactgccaccatcatggcccagggacatcacctgctgctgggattatcacagtggcctcctcactgttgtccctgtgtcccccgctctgtgccctgtgttttgttctcaatacagcagccatcaggcccaggagaacaaggattttctcatggtgaccagagcattccttcttcctccaccatgtcccgatggctctggaagtaagagatgacaagggccatgtggtacttcctttcatcaggtagacagccgacagatataataagcgcttgcagtttatataatgtttattatgttaatataagctttgcatatatcaattaagtcctttaatccctacagcaacccagtgaggatggcttcacaattttcctattattagagacgaagccattgagacacagatggatttcaaaattgcttacaaccaggtagttcacaagtggtagggttgggatcaggatccagggagtctggctctagagtccatgctttaagccaatgctgtccaatagaactttcagtgatgaaggaaatattccatatctgtgctgtccaatctggtaatctctagccacaaatggctattgaggacttgacatgtggctagtttgactgaggaactgaggaacttttttttttgaaacagagttttgctctgttgcccaggctggagtgcagtggtgctatctcggctgactgcaacctctgcctcccgggctcaagtgattctcatgcctcagcctcccaagtagctgagattacaggtgtgcgccaccatccctggctacttttttattttattttattttattttattttattttattttattttattttattttattttttgtatttttagtagagacagggttgcaccctgttggccaggctggtcttgagctcccagcctcaagtttatctgcctgccttggcctcccaaagtgctgggattataggtgtgagccactgcacctgaccaggaactcagtttttaattgtatttagttttaattcatttttatttaaatgagaacacattgttacatgtattagacagctcagctctaaaccactatactattgtgctttttatatatgaccagaagagtggcacagagttatttaactcttatttgcaactgttatttaaaaccaaagatacaacatctttatgggattccagctgccacctgtgaatttgaagtcttctaaacaatgtcatccataatctatgaaacatatgcctctgtaatgtcaaagctctgttagaccaaaaacagttatccaaatacattatgttcctttttattgaaggaaatggaggaccaaagtgttctgactctcatttgtccttacttaagagcataattgtgtaagataaaaataaagaaaagctaatcacaagaggtagatcatgacattgcagatttagttgaaatttacaagttatatttctattgattttttcattgtatttttttattttggaaaattgaaaatgtataaaactattttaaaaaagaagaggaaagaaaaatccaagaaatcttcaccaacaggaattaatcactggcatatttgagtcagtcttttttcctatgtatataatatttttaaaactgtatggattaattcttccctttttctaaaagaaaaagcacattattgacttaaccctcccccaccttgtctatcacattaatcacagtaactctccttagtctccagaaatagacactgttctgaacttggtgtgtatgctttcagcccattttgtaaacttttacatgtatattcacatatccttagaaacacataatattgttgatgtgggaatttttaaaaaacatttatataaatgatatcacactgtatgttgttctgcaacttctttccactcgtcatttttgagctgtgcgcattttgataatttacatctagagtcattctataactattatatcctaggaacacaccacagattattcatttcttgctggtggatatttaggttttgtcagtttttcattatttcaaattatgttgcagtgaacgtccttgtacatatcccccagtgcatctgtgcaaatatttctctgtgcagataattttaagattatagaattcactcatcttcaatattactaggtccttccaaagtacctccaacttggctatgatgtagactcccaccagcagcatatgaaagcactcatttccccatacttacaccaacatctgataccgaccaacttaaacattttgcacatttgaagtaagtagcttattgtggttctattttgagtttctgtaattgctagtgacgttcaacatccttccatgttgattggccatttgaatttccttttctgtgaaatccttgaacctattatttatgcttctttgttttgagttgcttatcttactgacttgtaggagttgttcatcatttctggttaacagtcttctcttactaggcatgttgcaaatatttactccctatgtatagcttgtcttttaacctttttatgatgtattttgtcatgcagaagttttaagttttagatttaatgatggcttctaacaggcttctctcattcttgttgaactggttacaagccttgttaaatcttcatgtgttaaattctaggaaaagagaggagattcgtgtgtgacttgctgatttattggctgattgccatttctcagagaaaaatattttcttgtgcatatttatagcatttccttaaggagcaaagtccatttttatatcattgtgaatgttttgttttggtggtaatgattttttgatatctaataataaaatgttgacagtggtaaaatccttgtgatagcttataaagcaagaattgattttgctcttcattgcacactctttgaaagtgtatattcatggctctttttcctggatttttctagttattttgatctgctatctataattatactgaaaatgaatttcatatgtttaaaaattattttagatatcatctgtcttcaggcagaagtcatagcagactggaggcagtctaccagctttaaatcccagctctcccacctattatctggaaaccttaggcaaaccactttaattttttgcttctcagtttcttaatctgcaaaatggggtacctgtaaaataacagtgcaagtgtcatgggacttctgtgaagattaactgagtggtaacacttcagagggtcctggagcagtgcttggcatagagaaaacattctacagggcccagcagtcattgtccctcaactaccttaagattcatacaaatgaggagaaacactgtagatttagtgctctctggaaagtatattcaagtcaaagagcagctgacgtctctaattgtcatttcatatgccgttagtgacaccgaaaaatagaccaatacagacaatgacgagcacaactgatctatatgaaactatcatttatagattctccatcacacactttcagccacccaagctcagtgctttcttactccaaacacttaaaaaacaagttaaaaacagacaaaaaaactcacaaaagatatgtccttgaaccacagctccaaaagtctggcccatcacaagtgtgatggtagagttatcagggtcagaatgtgtttggccccacctgccccaggagtccgcgaagctccgtgaaggcaaaggccatgtccatgccaaccacatgttggtggaattcagtcatttctaggtgcttagcgtcaggtgggtgccgccttcattctttgttttaactgacaaataattgtgtatttgtggggcacaatgtgatgttttgatgtatgtgtgcaatgtggaatgattgatcaaatcatgctaacaaatccatcacctcacatacttatctttttttgtggtgacaacacttgaagtctccccttttaacaatttggaaatatacaatgcattattacttattctagtcaccattctgtgcaatagctcagtaaagtttattcctcctgtctaactaaaattttgcaccctcatctctcacctttttccctccaaccccctttcccagcctctgggaaccaccattgtaccctctgcttctgtgagcttgatgtttcagattccacatgtgagaatcacaagttagatcatgtggcatttgtcctgtgccaggcttatttcatttagtgtaatgtcctccaagttcatctctgttgtcaaaaataacagaatttccttctttttaaaggctgaatagtactccgtcttgtacacgcacgttttctttatacattcatccaatgacgaacacctcggttgcttccataactcagcactgtgaattctgcagtgaacacggaagtgcaaatatctctgtggcacactgagttcagctcctttggatctctacccagaagtgggattgctgggccccatggtagttctatttttagttttctgagaaacttccatgttgttttccatcacggctgtgctaatttaccttcctaccaacagtgcacaagggttcccttttctccacagccatgctaacacttgtcttccatctttttttataatagccattttaacaggtatgaaagaaaggggcccctttgttctttccaaacgtttttcatgtgctctgtccccagcccctggctggctggatgccgggatcagggtgtgtgaatgcccttccacagcttcccaggagtgctgggctcagggtgggaagagctgagtttgaggcccggtcccttactaacgaacaataattaatataacctctctggctttagggagtctaggggacatgtggtcatcaaagattgagtgaaattaacatgtgaaatgatgtaacaatgtgggactttaaatagtgaaagcggaatttcaccagaaattactttgatggccacaactagatgttaaaatgaaagctgacgcatacttatgacagaacatgagccacattattttatttctgcatttctgcactctctccttactttggtaaatcattttgaaacaagcaccccccaccctgcagctcttccattcatgaatgatgcaatattgagctgtgatattttcagaagtgtttgctaagcattggcagcttaactaaaagcatcctctctattttgctcttggatcactgctctcacctgttaacccccagcagaaaatctgcctgctgaacaatagcttgcaaacgcagcgtggcactcggtgccggtgccggcataaaggagtcagcgagcagggcgttgggtcagcttgctgttgagggcaggctgtttttgttggcacatcccttttgtgaaggatgtagtccttgttctaccatctgtaccaggctgcacaccatctatttatttgctatccttgaactaacggggtattttcccccagccataaatgggttggtgtgagagaagcttctcctgctgagggactcacttctgcaccgcatcctctttgttaatcttctgcaaaataaggcagttttctgttgaagagaaagcaatcatcaatttttcataagagcagcaaagttgtgaatatcagaggacctcttgaataaagagcttagaggttccagtgagagacgaataacaaagccctggggggaagaaaaaagtatatccttttttatactatttatcatcaactcccccctccacgcccctgcccccccatcatccgcagttaggaaggaagaagccatttatgcaagctaacagtccttcaaacctcatgaaccttaattttaatccttatcagtgcctttttaaatgaataatacagtgaccttcagctttgtcctatattatgtgaggttgattcgtaaagactgctttagttttttaaattaaggcagaagctatatgtattctactcaattctagcattagtgctgtcccaagagtggcatttatgttcttttgcttctttggtataaataaatatcaaagtaggaagaccagtgtgaattctacaaggaataataaactaaaataatatggcattgattttgttcaggatgtctaagtgtgtttttatgattgtgtatttttatagctttttcacacaagtgacatgaattctgggcaattaaaaaggacatgaatttcaaggcatttaggaagagaatctgttttctaatagctgtgtcttttaccaagttgtggtttttgagaaaagcattgtcgatttcagacctccaccttcagaaactggccagttattgccattttgtattgttttacaatattattgccatgagactacattagagaactttgttttggctgctaaagtgcaatatgtggatataacaatctaataaagaagcagagaaagattcctttacactgcatgtgtattatctttttgagtttcttctgaccaagggttcttagactgtagctttgagtcttattagtgaggtctcaacccttcctactgttgagggaggcatgggccccaggagcgtgtgagccttggacagtcacagagacaattcgtttacaaatgggaggggagcccaacgtggatggctttccacatgatgaatttatgacaactcatgttgtcacaaatttcagtaaactaacagtagcagatcctatgctgctgggctaacttctctatccccttctctcagtccttcttagatcattagtgttatttttttatcaactttttgttgcattatataaattactcaagtattacttaaattactcaagtaatacataaatatcagcaacttgaaaaaattaaaacattatagataagttaaaaatcaccttggacctctaccaccatacaagttcctattccccctcctctcctcaataccctccaccttcccagtaacaattaccagtttagtctgaatcctctgaaatattttttgtatatttaagcacagtgctgtgaatctatagcactaagcaactagatagcattgttttttaaaggctttttcccctatataggcataacattgaatgtgtctgcagctggctttttactaatatttctttaagatctttccatgttaattcatatagatctacctcattgtttcataatatttcatgttgtgcctatgctgtaatttatgtagcttttctcctattcaggggcatttgtgttccaatttttctctattaaaaatgccactgtggtgcgtgacttcttatgcacatgagtgcctctctaggtttatacctacagatggaatttctgggttacagaatgtgcacattttagatagggtcaaatcgctctccaaaatggagttaatgtacatttctcttattactaatgagatcgaaccacttgtcatatgtttattggctattggtatttcctccctattatttgcttattcaaacactttgaccatttttctattgggttattaatttgtctaattactttgtaggagttatgtgtgtatgcatgtgtatatatacatacacacatatatatatacacatatacacactgtattgtgatcctgtatctgttacatatgtcagtctcccagactttggcctgtcttttcaatttgtttatggtgtcttttgtcaccattgtttttgacctagatttatatttttcaatcttattctttttttctccgaatttccttgtaaatatgctgtaattatcattgtaaacttattatacattgcttattagagaaataaccagattcatttggggtttgaagctgagactctgtgctgactccttgctgtccatccctcagttgtaggggagcctcatgtggggagggtgtggtcatagctactgaaatccatttccagcaaactaggatgataaagcagctttggtgtgaatgttttctttcacaaatgtatgtggattgaaggtttgaagtttgaggcaacatatatgtggagagggtgagcgcattcattatatgtgggagggttttttcatttttattttttgggtttttttttttttctggtgtaattgggaaggaaaagaaacagctcagcactttccctgccatctacttttcagaaactatgggcccacaactcccaaggctgtattctaggttttattgtatacttcaaattgggatatatctcaaaacagttgcatttaattgggagattattaaaaagcatgagcaaattcagagtttcttgcccagaaaatgctgccaatgtccaacctaaatgaggacattcttcccttcctgtttcacagtcctgccaggagccatatgaagaaggcaagccagtacagatgatgggtacaccggggctcagacttcaccactatgcaatatacacacataagcaatctgcacttgcaccccctaaatatacacatataaaataaataaaaacaaattttgataaaggtaaaccaggtcagggcttttaccagactgctgttccccaaacttcagttatttgcaaaccatcttgacaaatgttgccataacaactttcctcctattaatatgcttaatattcttctaatattaatatcctcctaagaatatgcttaatattcttcttaaactacctacttattgtttgtaaatttatttaaaaggataaatttaacctttgtcactggccacagatggaaaaccagtttcacttttcatatataaaatagacagtaaccatgaaaacaaacacaaatacaacaatcaaatattagtgaaatactctgagccggaggtctgagaatgaaatcttttaacaagagttcttgtttaaaaggctaccaaaccaacatttttctccttgacataaataggattgaaagagaattgaaaaaggaacaacttttcccacgagacttggggtcataccgattaaaatcttgcatcaacttagaatgaatcaatcatacagaattttgggtgtctgcatgttcttgttggtgtgaggtcatcatctgtgtatccagagcacatactttgcccgactaccttgtccccacaccatttggcttcacacataagcattgttccgtcagagtcaaagagcaacaaggctctttgtcaccatgagagacagagagagacagggcgaggtggggggcaggagggagagagcacaataaattcagtcgaattgaagcttatattgggaagaaaacagccggctactagctgtaatatagacgttcatggccatatgtaaagtgcagccatgttactcaaggatccatttaatttgttctgggctctgatgtcaccatgcacccactgaggtgtttttaaaacacattgagatcatacatatagttaaaaacaatcaagtaataccaatagggttattaaatgattccctattaaatttatttcctaccccatctttttcttctctcatcgtacttccaaaggcagccagttttaacccattctattgataggccttctggtggttagctccacatttataaataatatgcttacacctttatttagtagtttgccaccttaaaccaatatctatcaaatttttgctatgtcagatgagaatttaattaatattattatcctaaccttttcctctaacttcattatgttttgaccattgagaaggctcttgtcagtctgattcttagttctttataggtgatctgtttactcccgtggaaattttcaggatttttatttttgtgcttctgaaatttcacaataatacataagattttatgcccaagtattttggatttctaaaaagatgccaactcagttattttctgtagtttcttagtatttcatatattttgatactgttgtaaatggtatcttttttcaaatatcattttctgattattcattttagcatagagaaatgcaactcatctttgtagaacgatcttgtattctacaccttgatcaactcacttattacagcatttttgtacacttcattggattttctagttgacaatcatgtcatatgtaaataaacaaaactttacttcttcttttacaatctggtcttttatttattttacttaacttattccactggctaggaattctggtgcaatattgaatagaagtggtgagagcagacatccttgtcttatttctgtcttattctagggagggaaattcaggtttaagtaataaatattcagtcttgaatattacaccattaagtgtgatattagctgtatggttttttgtatatgccctttataatattgaggatgttccctttaattcctactttattgagagcctttccaggaagatatgttagattttttctgatgccttttctgcatctattaagatgatcatatggtttttctttatagtttagcaatatagtggattatattgatcattgattgatttttgagtgttaaacctattttgcattcctgagataaactctgctttaccatgatattctttttggcgtattgctggattcaatttgctaaaattttgtttagaatttttctaggttcatgaggatattggtctgtcttctttgcttgtaatgtctttgtccagttttagtattaaggcattgctgacctcatagaataaattggaaaatatttcttcctttccaatttcatggaagagttgtgtagagttggtattatttcttctttaatacttgatataattcacctctgaagccatttggcccagagttttctttgtgaaagagttttttttaaattacaaattcaatttcttttatagataaagggctacaaggttatctaattcttcttgagtaagctttggtaatttatgtctttcaaggaatttgttcatttgagttgttgaatttgtcggcataaagttcttcacaacatcctcgtttttatattttcagcatctggggactgaacagtcatgccacttctctcaattctcctgtcagcaatttccgtcttctttttttttcctaataagtctggctaaaggtttatcagttttattgatcttctcaaagaaccagctttttgtttcattaacttttttctattgtttttcttttttctatgtcattgttttctgttcctttgttatttccttctacttaaagtttgatttgctctttttttttttttagttttttaagggaaaaactaatactttttttcttttctaatataagctggtactataaaattttccctaaaaactgttttaatggcatcctccaaattctgatatattgtattttaattttcattcagttaaaaatactttctaaattcccttttgagttcatctttgacccatgagttatctaaaagtatgttgttttgtttccaaatatttgaagatttcccagagatctttctgttgccatttttttatttaattccactgtggtcagataatgtactttgtgtgactttaattattttcagtttaataagacttatggaccactgtatgatctattgttatagctgtccatgtgttattgaaaagaatgtgtattctgctgttttgggagtgaaatgttctataaatgttcattttaaaagttacttgataatgttggtcagatcttctattttcttatggattttcattctgtttgttctatatattattgagacagaagtattaaaatgtctgactatatttttggatttgcatgtttcttcttgcagttataccagtttctatttcgtgtctactgaagctttgttagtaggtgcatagacatgatttgtgattatttatgtctttttgatgaaatgactccttatcattatgaaatgacatttttcatcccaggtaatactctttgatctgaaacatcttttgcttgatattactgtagctttccttgattggtgtcacacatgatatttttttttatccttttacttttaacctgtttgtgccatcacacttgaaatgtgtttcgtgtaggcaacgtgtggttgggtcttcttttttaatctaatttgacaatctcttctttttaattggggcatttagaccatttatatttaatgtgatatgtgatgtgataaggtttatatgctaattttgtgggagggttttgtcccatctcttctttttttttttctcttttcctgcctgattttagattaaatgaataatttttacaatttctttttgtgtcctttgttggcttataagttataatttttgttttgttattttaattgttactttaggacttatagtacatacatttagtttatcacagtttaccttcaagtgattttatgctcacatatagtgtaataatcttggaatagtatattttgatttttcccctcccaatcttttttgaaattattggaaaacatttaacctctacagattttataaactctacattatgttattatttttatttaaatagttaattgtgttttaaagagatttttaagttagaagtaaaacatgcacacacatatgtgtatatatatatgtatatgtgtatacatacacataagtacacacacacccatttccaatactcttcatcctttgtagagattcctgttaccatctggtgttattttcataacccttaaaggactttttttaaattttgtggtgaaatctgccagtgatgaattcttctaagttttgtgtgtctgaaaaagtctttgtttcctcttcacttttaaaagctattttactaaatataaaattctagtttgacagtttttttccttttagtactttaaaaatgttgcatcactatcttctcacatgcattatttctgtctagaaatatattatacaataatccctgccttgattctctccatataacgtgccttcttatctgaagctgcttttaagattttttgttcgtcacttcttttgagaaagttgattatgatgtaccttgctgtaattttcttcgtatttctttcgcttggggtttattgaatttcatggatctctggttttattttttctatcacatttggacattttatatccattatatcttctaatttttttctatcctgtcctctttttatttcagggactccagtttcttaagtacaggctacttgaagttagcccacaactcactgatgctctactcattttataaattatcttttcctttgtcttccattttaaatatttttgtagctatgtcttcaagttcactaatcttttcttctgcagtctctaattttccattattcccatccaatgtaattcttatcttagacattgttttttatctgtagaaatttgattttggcctttaaaaaatatcttccatgtatctacttaactttttaagcatttgaaatgcagttatagcaaccgctaattctgtgttaatttggggtctattttgattgattgatttgatatcctcttatggtcctattttcctgctttttgtgtgctggttaattgttgactgggtaccagatattgtatattttactgtattggtactggacatttttttattcctatcaatattcttaagctttaatctgagacacagtttcattgcttagaagcagttttatcctttgtcctcacttttaaggtttgttaggtgataccaaagcagtggttggtttaggtgttgctattccctacaatagaggcaaactgctctatgtcagagaatcttaaggtttcccagtctgactagcaggaatagactctatttccaggtctgtgtaagtagcgggcactgttcttcaatctttttgtgtggatttccacctaaccttaggtagtttcctcacatgcatacacttctcagcagtcagctgaatactcaagaaggactatccttatttttttaaattgttatttatttatttatttatttatttattttgagatggagtctcactctgtcacccaggctggagtgcagtggtatgatctcaactcactgcaacctcctcctcccaggttcaagcaattcttctgcctcagcctcccaagtagctgggctataggtgcaagccaccatgcctagctaatttttggtattttttaaatagaggtttctccatgttggcccaggctgatcttgaactcctgacctcaagtgatccacctgcctcggcctcccaaagtgctgagattacagttgtgagccaccatgcccagccagaaggactatctttagatctttggcattttctctatgtgaagccttctctccagtactcttctctgtaaactctagctgcctaggtgtcctcagactcagcttcatctactcaatgtgaggagcccaccaggctctgcctggatttgccctctcatgctgtagcctggaacttctctccaggcagtaagcttaaaaatcactgggcccgtgtcatttgcttcccttctctcaaggatcactgattgttggctgaagtccagtgtcttgcatattatttaatatattttgtactgggatggggggagtgaggttaggtgggaggataaagcaagttcctattactccattttggctagaagtggaaatttgggatttactctcattttagtggggttttagttaggacaagaaataatgcatgtgcttattccaccatattgagccaggagcacattgcacatttttaaaaagatcttgctgcttgtgttattggagcctctataacacttagctcatggttttgttaattaattgtccaagttcatattctctaaatggacttgttgagaagtggaaactgtgtctcattcactttgggatagtctcagtgctaaattggagctccataaatgcttgttgaatgaattagtgaattaatactgttgtcttattggtaaaattgcaagtttaaagagtcaggactgaaggtaagagtgctttttaattaaaacctttgtagggaaatgcaatttacctttcaggacattattcttttcaggctacagctttttaagagctgttaacattagcacccacttctgcctttgtggcaggaaacacttcttaaaaatgttgtcacatattttctggtagaatgtatacgcaacacttgggggaattttattcttggccatttatcctggtcattttctaatctgatctcaatgtaaaagttattgtggaataacagaaaaatacatctttccaatccatctagtctcttttgtgtgtgtttgtatgaaataccaatttactcttttaaagaattcttaaggttccatgtataattttaaagacaaatggatatattttaagatcaaatttcctcaaattttttcctgttctaaagagtgtagaattgtattatatattcacttaatctttcaaaggttcagaagctaagaaattagagcaagatcatcaaaatatgtcactttttaattcctctgcttgtaaaggcaacatagcttagtgattgcaagtactgtagagcccggtggcctgtgtacagctccacctttttttttttttaaatgcagagtctcgctctgtcacccaggctggagtgcagaggtgtaatctcgactcactgcaagctccccctcccgggttcaagcgattctcctgcctcagcctcctgtgtagctgggattcaggcatctgccaccacacctggctaatttttgtatttttagtacagacggggtttcaccatattggccagactggtctcaaactcctgaccttgtgatccacccacctcggcatcccaaagtgctgggattacaggcgtgagctaccgcacacggccacagctccaccttttactagctgtgtggccttgggcaagtcactgaatctctccaagcctgttttctcacgtgtaaaagggtttaataatagtacattctagggttgttaagaagattaaatcggttaatgtttacaaagtattttaaatggtgcctgatatacacagtaagtgtaatataagcattagtttaagcaaaataaaatagtgaaattaaagtaaaaataaaactttattttataaatatttctgcattttattcttctgactttcccaagaagtaaaaattaccctcttttatgaagttatgtcatactttaatagcttgcatttttggaaatcagttgaatattgaggggacaaagaacccttctaattttccttcaacatcttctatataacagtgatgcctatctccctatttatctcacagtgttgtatttagcaaggttttgcgcttggtacctctgtttttcttttagtctaaaccttcggttgtccatgattcaactttaaattatatctctgaacggccccctcctcaccacgaagttgattctagagattttcccatcataatatttaagatctcctttttttttttttttttttttttttttttttttgagacagagtcttgctctgtcacccaggctgggctgcagcggtgcgatctcggctcactgcaacctccacctcccaggttcaaatgattctcctgcctcaacctcccaagtagatgggattacaggcacccaccaccatgcccagctaatttttgtatttttttagtagagacgtgatttgtccatgttggccaggctggtcacgaactcctgagcgcaggtgatccacctgcctcggcctcccaaagtgctgggattacaggcacgagccaccatgcccagcccaagatctcctcttctctctgttatgttgctattacccgggacactttaataccataaatatgttttctaaccttactgagttatttgctaatttaacatccttattttatttagtgttccaattatgagcatctgtggcttgcagaattgtgtcaacttgctagagacagacttttgatttagcattcgtttccatttttatgcttatctgtcttttttatttgtgtttgcagaattttcaatttctcatcaatctctctgggtcattattattgtcttagcatctcattgtccagattttcaagaagttaagaaagcttagtcagatggttgactatattttgtaaatatatgactcagctaatggctctttgaaatttacatggactttttttacttagtagtcttagtctgtgtaatgccatctttgagggacttccatgcacaatctcatatcatctccgtatatttgtttctagctgggtatttgaggctagatagactcacaagatgtttacagaaacaaagatgagtcaaaaatccaaatctcctaattagtgtaattttcaatatagcccagtcctgtccagcatcaggagacttgacagcccccaaaccaaaagggcatctgaaatacatattgctcatccctccgcctgcctcccccatgccgagacaggagctgtggtgagcgtgtggatggcacaggctctgcgggtgtctgactagagagcctcagttacgcgctctccacctcatcacacagcagccccgtgtaatagaaatcgcttattatgagggttggctaaataaaggcacattgtgaccagtcacaatttctaaatgaatcctcctgactgatctggtcctgacactttcaaagctgccgttattactgaacctgaacatgtggaaaggacaagtcaagacagaatgataaaattcttgaatgcttttgcttaaaattattcattctcttgtgtgtgtgtaaatggggacacacacacacacatacacacactccatagacactctcgcatacttaaacggttccctaggtgcacttttatcattttatctcatctcactttggtagtttccattgtagtccttctgtagactaattctctaaatatttagaaaaataagagggtcttttatctgtgtgtagtcgtggattttgctgcctcttaaagcattatcttttctaagtccttaagtgttagaagtgggaaaaccatctttcttttaaatttagcaaatggcacttatgtgcatatgtactgatgccatatacacacttacactgtaatagaaacatcgtggaaaagcaaaccataggcttttatcataggcatgagctttttccctctcatctccgcctggaaagatggttaggagaatgagaggcctctctggatctgtatttataagccttactggaaaaaaaaagtcaattattttttagactcagctcacaccataataaatgtgaatctaaacaatcgctcaagtgctttctaagcaatggttctatctatgatcactcagacttccttcttttatttagtaaaaaggtaacaaataagaatggagtgccatttgcatgtttcttatttttactcaatatggagtccagtggttgagtaggctcatccagtagcaaagagaagcaaacaaaattgatttcctgtagcccacagtgattttccctagatttagagagcatgtgattccaagatgggtgtggggtaaaactctcaaggctttcctggcgagagacccgggcatgctggtggagaaaccagacatcatgcttgggaggttggggcctctctcctccttgaatgagctctgttttaggatgttgttcatgtgaaagtattgcacttacctcagcataaaatgtcaagccatcacatccttgggatagaaacaattaaggaaggatttatgtttgtaaaaacatgtgcctattaaggtaagtaattagggcacatgaaagaaagataatatggagatgtaaaaattgggggttctgcagtcagaccccctggatttaaatcctagctccacttgctgagtgaccttgggctagtcattgaacctctctgagcctcagcttctttccctgtgaaatggggaaactaatgggtttattgtgagtattaaatgagttaatacatgcaaaacaattcacacatagtaagcatgaaataaatactaattattatcattgttacgcactaagaaaggatttttgcaactaaagtgtcaaaagaaatggagatgctaaagaattatttggctttaaaagatgaattccagtacaaaatgaggctgtttaacaaccagattccatattacaatcagaaagttccagcagagtacctcaggcttcatctggggaacatgtttaaaggtaccaataatttttgggtttttttttccaattttaataaatgaaattctcattcctttctgtctgtctctctgttagcgctattgctttatcttactctgtagtctgtatttctcttcctagtttcttttttttttagaactagttgtgaa

SEQ ID NO: 482 - DNA, 20001 bp, Homo sapiens
cctgagacaattattaaactaaagacacctggtcccgtccctggagcctacaatttagtcaggcattagttcaggatctggatgtatttttagtttgctccaagcgaatctgaggcattaccaggtttgaggaccactgcgctagggacttctggctgccctgactgcccaagagtagttcaagtagctgagtgaggagttttgatgggagacctgagagatggtcctaacatcccagaagttccccacatggctaagaaagagagggcagccctaacttgggagcaaaaatcagttgaaggtttgtattaatcagggttctctacacaaacctaacagtaacattctgcttatatataggatttattaggttgatgcaaaaataattgccattactttcatggcaaaaactgcaataattttcatttttttttttttgagatggagtctcagtctatcacccaggctggagggcaatggcacaacctcagctcactgcaacctccatctcctaggttcaagtgattctcctgcctcagcctccggagtagctgggattatagggattacagacagctaatgttttttgtatttttagtagagacagggtttcaccatgttggccaggctggtcatgaactcctgacctcaagtgatctgcccacctcagcctcccagagtgctgggattccaggtgtgagccactgcacctggcctgcaattacttttgcaccaagctaatattatgaggaattggttcatgcaattatggagaagttcacgatctgccaactgcaagctggagacccagcaaagcccatggtataattcagcctgagtgtgaaggcctggaaccaggagaactggtgatggaaaagtcgctccgagagcaggggaagaggagagaagaggagattctctggctgacgcagagagacaggggaaaaggagcatactcctcctccttctgccttttgttctattcaggcctttggtggattggacaatgcctacctacattggggagagcaatttactttactgagtccacagattcaaatgcttatctcctctgtaaacaccctcatagacccatccagaaataatgttgaatctgggccctacttggccagtcatgttgatacgtaaaattaataatcacaaaaatcaaagacggaaagtaaccagaaagagatgacaaggagactgcagcatagctttagacctgggtcaagttcagattaaacttcttttaatcgaaaacatgtaatggggtcaaaaaactacctatcgggtgctctgctcactatctgggtgatgaaataatttatacaccaaataccagcaacacacaatctacccatgtaaaagacctgcacatgtaccccctgaacctaaagtaatagttgaaaaaagacaaaagcaacacacacagacacatatgcacacacacacacacaaacaaaaacaaacaaacaaacaaacaaacaaacaaacaaacaaaacagggccgggcacggtggctcacgctgtaatcccggcactttgggaggccgaggtgggtgatcacttgttaggagttcgagaccagcctggccaacatgacgaaagcttgtctctactaaaaaatacaaaaattagccaggagtggtggcacatgcctgtagtcccagctactcgggaggctgaggcagaagaatcacttgagcccaggaggcagaggttgcagtgagccaggatagtgccactgcactccagcctgggcgacagagcaagactctatctcaaaacaaaaacaaaaacaaaaaacatgtaacatagctccactgtacagcgtttgcttacagaggttgcttctgcaatgaagagaattaggcatctgacttgaggtatgattacagactgcagtgaaagctggaagttgaaaagtggaagagttatgtgctgagtataaattctggtgcaccaaaggttctattactttctatctcaaaatcaaatttcaattgctctgggctcctacccaatgactagcagaaagttcaatcctcatagattcctgagtctgtcactcactcctcctccacttggtcagaaagtccctgggctcctgtggccttagaaaagtggcccagctgtctatggccatgtcaccctgaacattctccgtctgtctgatcttggaagctaggcagggtcgggcctggttagtacttggatgggagaaaagtggggcaggggctgagctaaggccttcgtccatgatcccagcatctctcaagttgatccttgggttccaggatgctacggataagctctggtccctgccaagacatggtctctgtatgtcaggctttgctgctctgggggtgacaatgatagccccatagaggttctcttcattgactgaaaggacctcatgcacagggtgtgctcatacatgcttgaggggcagtcaattcccctctggtcagtttctgcctcccacactccttctaactgctcccatttggttatttccacagaactgccccacctgcccctgcaatgagtcttcacacataccatactggcctctccttctcagggatgggagcgagtggagaatggcgagtataacttaggttggcaactctttttttttttctccttttaataaatctccctgatcctgctgtgaagccccagggttggtttaggtgggagggtcggaggctgagatggctcctttcctttttattaccatcagcatatttgggtaaaagacagagctgccaaccaatgatggctatggtagccttgcagtcagagagaatgtgtttatgaagacggcagaaagagagcaagcggacccaacgccactcccaccccactaagaagccacttcacagcacatacttttcctgaatcatcagttggacctaattccttttagctgttaagaaaagctgaatcttgtctaaaaacagtcccatctataatattaagtctggccctagggtttgtgttaataaatggctatagtgtaaaacaacctgaaacttctgctttgccaattctattctagatgtggatgagtcagggttctgggttgcaagaaacagcgagtaattggcaaacgtgagcagaaaaggaatgcactggaaggaaatcagggagctcatgtattcttcgagaaggctggagaatcaggcttggaaaaggcagagccaagggaggtgtgggagcaggaagcccagcaaggggctgcacagacagcatgactctcccccttcttttttaatagcgtttttttatttgtgcagtaagccattggcttaaaaaatgttttaagtggggagcgcctctgccccgccgccccatctgggatgtgaggagcgcctctgcccggccgagaccccgtctgggaggtgaggagcgtctctgcccggccgccccgtctgagaagtgaggagaccctctgcctggcaaccaccccgtctgagaagtgaggagcccctccgcccggcagctgccccgtctgagaagtgaggagcctctccgcccggcagccaccccatctgggaagtgaggagcgtctccgcccggcagccaccccgtccgggagggaggtgggggggggtcggccccccgccaggccagccgccccgtccgggaggtgaggggcgcctctgcccggccgcccctactgggaagtgaggggcccctctgcccggccagccgccccgtccgggagggagatgggggggtcagccccccgcccggccagccgccccgtccgggaggtgaggggcgcctctgcccggccgcccctactgagaagtgaggagcccctctgcccggccaccaccccgtctgggaggtgtgcccaacagctcattgagaacgggtcaggatgacaatggcggctttgtggaatagaaaggcgggaaaggtggggaaaagattgagaaatcggatggttgccgtgtctgtgtagaaggaagtagacatgggagacttttcattttgttctgcactaagaaaaattcctctgccttgggatcctgttgatctgtgaccttacccccaacccggtgctctctgaaacatgtgctgtgtccactcagggttaaatggattaagggcggtgcaagatgtgctttgttaaacagatgcttgaaggcagcatgctccttaagagtcatcaccactccctaatctcaagtaatcagggacacaaacactgcggaaggccgcagggtcctctgcctaggaaaaccagagacctttgttcacttgtttatctgctgaccttccctccactattgtcccatgaccctgccaaatcctcctctgtgagaaacacccaagaattatcaataaaaaaataaatttaaaaaaaaaaaaaaaaaaaatgttttaagcattttaaagttacagtttagtagcattaagtacattcacattgttatgcaaatatcatcaacctctatctctggatttttttcattttcctaagctgaaactctgtatccattaaattctaactcctaactcctcatttgccccttctcccggctgctggtaaccaccattctactttctgtctctatgaatttgactattctaagtactgatgcaagtacttagtataagtactaagtactgatgtgatgtaagtacttagtatgagtactaagtactggtgtaagtacttagtataagtattaagtactggtataagtacttagtataagcattaagtactggtgtaagtacttagtataagtactaagtactggtgtaagtacttatgtaagtacttcacataagtggaaccacacaacatttgtcctttcatcactggcttatttcacttagcctaatgtctttaaggtttatccatgtcgtaggtcagaatttctttcctctttaaggcagaataatgttcaattgtgtgtctataccatattttgtctatccattcatcaatctataacttgggttgctttcatcttttggctatcgggaataatgctgctataaacatgggtgtgcaaatatctcttcaagtccctgctttcaacttttggggtgtatataaccagaaatgggattgctggatcatattgcaataatcttcctctcattcctacatctttatgaccctctcttaagatgcaatgttcagggaggagtacagccaacattcatggtgcccttgaccacactttctcaggctgcctctcattgtggccacagctaggtgcaggcatgctgagtcttccacctaaagcacccactgcttctctggctgaaccccaaggaattcactcagttttcagtctgcagcccagaagtgatgggagagttaacacactccagagtctatcctcactcagtgccccagtccccctcctttaaaacaaaaacaaaaacaaaacaaaaatcctgcttcattatatcatataattcacttatttaaaatgtaaacttccatttttttagtatattcacagaaatgtacaaccatcaccacagtcaattaattttagaacatttttatcatgcccaaaacaaaccctttaagctatcaccctcctactcccctaatcctctcatccctaggcagccactaatctacttcatttctctataaatttccctgttgttaacatttcaaacaaatggaaccatagagtacatggtcttgtgtgtctggcttcttttgcttagcataatcttgtcaagattcacccatgttctagcatgtatcagaacttcatgtggctcatgcctgtaatcccagcactttgggaggctgaagtgggcagatcacttgaggtcaggagtttgagaccagcctggccaagaggatgaagccccgtctctaccaaaaatacaaaaattaaccaggcatggtggtgcgttcctgtaatcccagctacttaggaagctgaagcaggagaaacacttgaaccctggaacccagaggtgaatattgcagtgagccaagatcacacactgcactcctacatgacagagcgagactctgtctcaaaaaaacaaaacaaaacaaaaaaaccttcattcccttttatggctgaataatattccactgtatggatataccacattttatttatcccttcatcagttgatggacatatttgggttgtttccacctttagctattatgactagcattactataaatattcatatacaagtttttgtgtggacatatgttttcatttctcttgggtacatgaccaggagtgaaattgctctaggcttccgttaagagtaactgtgagattcattctatattgttcatcagatggtccccaacaggatggatggagctccagtgtccacactgagaagctcagcaagacagccttcattgttgccacctccttttacatctcactttcctcactcctacagccttgctccctaggatgactcccaaaataaactcccgacacccatgcccttgcctgttgttctgctttcaggcaatccaaatgaagatatgaaagttcggccaggcacggtggctcatgcctgtaaacccagcactttgggaggccaagggaggcagatcacttgaagtcaggagttcgagaccagcctggccaacatggtgaaaccccgtctctaataaaaatacaaaaaaattaaccaggcatggtggtaggcacctataatcccagctactcaggaggctgaggcaggagaattgcttgcacccaggaggcggaggttgcagtgagccgagtttgtgccactgtactccagcctggatgacggagtgagaacctgcctcaaaaaaaaaaaaaaaaaaaaaaaaaacaaaaagatatgaaagtgcataagagttcaggcctgttcgtgttcctgttcttcacgtgtcagaggcaagaagcatgaggcctcttcaccttccataaagggagatggcgcccactgcacaaggtgtctgatgtaaactaagaaaaaccaaataacaacagcaaccaaaaaaaggtgaaagtcacaaggtgatcccaacgggtggaggaagaggactagcatgttagatgcatatgatgctaacaggggccctgtatgcattattctgtttaattcccacaacagcccggagaggttgataatttgcctggggttatcccagaagtgaaggagcccagatcagcagccaggttcctccgattccagtggctgtcctctgtcacctctccccaccctctggtcagtgctcttcacagcaaactggtaatttcctaactgcctttaagtgaaagtatctttttggctccacattctactgcaaaggaagccagatgctatttttcagtcctgtgaactttccatttctggcaggtggctggctctccttttccctggatagaatgtaatttccatttgctttccagcaatcttattgattgaacatgcttccaaattttttcatctttgacacgtttcttacaatgtaattttacagggcaggaatcatccttgttgaagaggagagtccaagacggggcggcattcttgtgtaatgagttgctttagctttttctttttttctttttcttttttttttttttttggctaaaactaagaatgtgtcagtggcaaacactaaaaatccacccccatttacttcttgtggctgttcctgagggatgtcagtgataaagtcacccaacttacaaactttacagtgagtcactcatcccattaaaggcccttgagatgtacgataacagcaaaaaaaaaccccacctttccagaaggatatcataacaattagaaaatcagtcatgatggcagtgaacctcaatgttctgatccacaaaataaggctttggtgaagaataaatgaaattacatttgtgaaaattttgcagtgtgagcttttattactcgtatctttacaaagaacataatagatactgctacatttttgcaaagcaagctgacatctggagtatgaaacaatcattaataattatctgtgctggtcaggcatggtggatcaaggttgtaatcccagcaccttgggaggccaaggcagggggattgcttgaggccaggagtttgagaccagcctggccaacatagtgagactccatttatataaaaaaattaaaaatcagccaggtgttgtgccacacacctaaattcctagctacactggaggttaagacaggagggttgcttgagcccagtaattcaaggctatagtgagctatgattatgccactgcactctagcctgggagacagagatagagcctgtctctcaaaacaaaacgaaaacaaaacaacaacaacaaaaagctgggcacagtggctcatgcctgcaaccccagcaccttgagaggccaaggcagaaggactgcttgagtccaggagttctagaccagctggacaatgtaccaagacccccatctctttaaaaagtgtagctgggcctgggtggtacataactgtagtcccagctactcaagaggctgaggtggcaggatcccttgtgcccagaagttggaggatgcagtgagctgtgatagctacacactccagcctaggtgacagtgacagagcaagatcctgtgtctaaacaagaaaaagaaacggtatctgtgcaaaaaaaaaaaaagtattcaaaagtctaaaccttgtgttagagacagccattgcacaaacaagaagaaagggaattcattagaccatgcataagtatcagaaagagcctgaatgtttttttaaatcattattatttacaatttttttttttttttttgagacggagtcttgctctgtcacccaggctggagtgcagtgacgcgatctcggctcattgcaagctctgcctcccgggttcacgccattctcctgcctcagcctcccaagcagctgggactacaggtgcccgtcaccgcgcctggctaattttttgtatttttagtagagacggggtttcactgcattagccaggatggtcttgatctcctgacctcgtgatctgcccgtctcggcctcccaaagtgctgggattacaggcgtgagcaactgcgcctggcctatttacaaaaattttttagagacagagtcttgctccatcatccggctgcagcctggacttcctgggctctgacaatcctcctacctcagcctcctgagtagttagtattacaggcataggcaaccatgcccagctaattatttttaaagtgttttgtagaggcagggtctcactatgttgcccaggctggcctcaaattctagacctcacctggcatggtggctcacgcctgtaatcccaacactttgggaggccaaggcaggattgcttaagcctaggagttctccaactccagcatagtgagaccccatctctaccaaaaatacaaaaattagcctgacatggtggtgcatgcctgtaatcccagctactggggaggctgaggtgggaggcttgctcgagcctgggaggcagaagttgcagtgagccaagatcgtaccactgcactccagcctgggtgacagagtgagactctgtctcaaaaataaaataaataaaaacaggccaggcatggtggctcacacctgtaatcctagaactttgggaggctgaggtgggcggattgcctgagctcaggagttcgagaccagcccgggcaacgtggtgaaaccctgtctctactaaaatacaaaaaaaaaaaaaaaaaattagccaggcatgttggcatgtgcccgtaatcccagctacttgggaggctgaggcaggagaattgtgtcaacccaggaagtggaggttgcagtgagctgagattgtgccactgcactccagtctgggcggcggagcaagactccatctccaaaaaataataataataatagtaaataaaataaaaataataaaaataagaaataaatatatcacctcgttagtccttacaacaaagccaatagcctttgttcacataagtggaatcccactctcatttcatagctaagaaaactgaggctcagaagagaataggatttacccaaagtctcaggaattcatctgagccctatggaccaccccacagcagtgcagattatctttgcaaggtattacgtgcctaagacagtctttccagtagatgactcagtgagctggcaccacttgcagactagccagtagagtgaccacagtgtatcaggaagatgtgtcactgagaaaacaaaaccagcaaggattgtgtgatgccacagtgactcactgtgcccaaggtcccccactctaactaggagtattccccagtggcctttatacaacttgctgatcttttcctacttggctcgtctactcgccgcacaatcattcccatgcagccccaccccaccccagtcccacccgtcctcctgatggggcctgcttctcatcctccgctgaggtgtcagattgacttccagaggcttctgcagagcacttctcactccaatctcctccaattctctaagcacaagcaggaacctgggcatttccagctgctcaagctaagaggtcccccttccagcctggctcgtgctggtgcttaggtggggctcctgtccctatcccctacagctctgttgtctctcgatatgtcactctttgcaccagaaagaacaaccaaggatcattctcaatgcttcacacagaaaccctcttctcccaaatgaatttcccgttccctttctcagggacccccaaaggtatagctgcagcctcccagaacacttattctacaggaggctgcttagaccacagctgtattcgggaaaaggaaatttcattaggatgtaatgatctcaggcctccaaagccctggctggctggaaaaaggaggctacagtcaggatcctgtccaagccgccagaagaagtggctgatggctttctaggctgcctctctctgtgcataatcctgctcatatctcactggtcacagctgcaaaggagtttaggagtgtagtatcttagatgggcacatatccctagaaaagcattgcaaagcagaaggggaaaatggagttgggtagacaacaagtattctcagaagataagggcatagctggcaatctgaacagtgagtgttaaggttagccattccaatatcacacagataagaaaaggccctatgatttggcaaccaagagattactcatggccttggaaaagacaaacctagcagaacactggattgggagtggggttaagcaatgagtgggggtgaggaagtggagacatgggacccagacttttctacagagatgtttcagtaaagagaaatgagggctgggcgcagtggctcatgcctgtaatcccagaattttgggaggccgagacgggcggatcacaaggccaggagatcgagaccatcctggctaacatggtgaaaccccgtctctactaaaaatacaaaaaattagccaggtgtggtggcgggcgcttgtagtcccagctactcaggaggttgaggcaggagaatagtgtgaacccgggaggtggagcttgcagtgagctgacacagtgccactgcactccagcctgggcaacagagaaagactccatctcaaaaaaaaaaaagaaaaaaaaagagagaaatgagagacagagaaatagacagctgtattataaaaatatacacataattcctaacctttattttgactgcttcttttcctctccccaactcaatcttggcaacagttactaatagcaaaattgactgacctgagttccagcttctctctgttcttcttcccagggaaggtgctaatgaggaatgaaatggccaaaggctgaactgcgggagggagaagtgaagctctggaacatgcagcagctgagcgtggagcactgaggattttctccatgacaaaaaggagttttatcatggccaggtgtggtggcttatgcctgtaatcccagcactttggaaggctgaggtggtaggattgcttgaggccaggagttcaagatcagcctgagcaacatagcaagaccccgtctctaaaaaattaataaataaataaaaagattagccgggcatggtggcctgtgcctgtagtctcagctacttgggaggctgaggtgagaagatggcttgagccctggaggttgaaatgcagtaagcagtgatagcaccactgcgctccagcctgggtgacagagtgagaccttttttttttttctttcagtgaaagtacagagatttattgcaaaggcagaattacacacttaagaaagggaagtgcaagtgcaatggggtttggagtccctacatttatgggtttattgaattaaggggtggaatattcatgaagattcctggaaaaagatggaaatttatcagaactgcggtgcaaacctaatgctaagaaaagttctaatcatagaagaacaaaaccccttgagaattaaaatgaatgaaaatccatttgcctctttcattacccctacaataataggactgcccatagttattttaattatcttattcccaaatattctattcccatcatgtagtcgcctgatcaataactggctggtttctgtacaacagtgactaatattaaaacagataataataataatgtataacatcaaagaatgaatctatctcttttttttttgagacagaaaatcgctctgctgccaggctggaatgcaatgcctctatcttggcccactacaatctccacctctctggttcaagcgattcccctgcctcagcctccggagtagctgggactacaggcgtgtgccaccacatctggctaattttttgtattttagtagagaaggagtttcactatgttagccaggatggtctcaatctcctcacctcgtgatccacctgcctcagcctcctaaaatgctgggattacaggtgtgagcccatgcacacggccactctcttaattcttgtggcaaagcatttctgaacaagtgagggctatccttaaagccctgaggcagtactatccaggtgtactgctgggtaaaattagtttcaggattagtccacccaaaagcaaacaaaaattgagagtcagagtgtaaaaggatacaaaataaagcattattgaaatctaatatcgtgaatcaattggtgtctctggtatttgggtaaatatggcataaggatttgacactatagggctgggcgcagtggctcacgcctctaaacccagcactttgggaggccgaggcatgtggatcgcttgaggtcaggagttcgagatcagcctggccaacatgatgaaacctcgtctctactaaaaatacaaaaattatccaagcatggtggtgcgtgcctgtagtcccagctactccagaggctgaggcaggagaattgcttgaacctgggaggcagaggttgcagtgagctgagattgcgccactgcactccagagcaagactccgtctcaaaaaaataaataagtaattaaaaaggatttgacactatagaatgtaaggtaattacaacctcattaatagctcctaagtcttgaactagatgattattctgcatttggtttttggacagggacggaaggagtattacaaagagactgactgacatggaaccaggaggccctgttttaaaaacttctcaattaaaggttggcgtcctcacctggcttccggtttgagggcatattggctcttgcatgggaaattgtttttgtctttaaagcgatgatcacggctgggcgcagtggctcaagtctgtaatcccagcactttgggaggctgaggcgggcacatcacaagatcaggagatcgagacgatcctggctaacatggtgaaacccgtctctactaaaaatacaaaaaaaattagccgggcgtggtggcgggcgcctgtagtcccagctacttgggagtctgaggcaggagaatggcttgaacccgggaggcggagcttgcagtgagccgagatcgcaccactgcactccagcctgggcgacagagcgagactccgatctcaaaaaaaaaaaaaaaaaaaaaaaaaaagagatgatcacaggctgagcatgtattgctttgcaaggggtttcttggtcccatacttatgggtctacttgagactttattttatggaggatctcctgtttttctgaggctggtttagaaaatacaagcattgccaagaaggagggcctgataaatgtaaagtggctgcaaagctggctaggaagtcctgtctcaataaaagagtaggacattccagcataactagaaaccagagttaccatatagttttctagcctgtagcttaggggtaaagtgttttgatttgggggtgccattgacacccatgacagtgcagcttttggagaataagggcccagagtggcagttcaggacagagtggccactgagtcaattaagaaattaatatttgccgggcacagtggctcacacctgtaatcccagcactttgggaagctgaggcggatgaattgcttgagcccaggagttcaagaccagcctgggcagcatggtgaaactctgtctctacaaaaaaaaaaaaaaaaaaaaaaatacaaaaaactagctaggcatgatcagggctgcccatagtcccagttactcggaaggctgaggtgggaggattacttgagcccagaaggtcaaggctgcagtgagccctgatcacgccactgctctccagcttgggtgacagagtgagaacttgtctcaaaaagaaaagaaaaagaaattaatattcttggctgggcgcggtggctcacgcctgtaaagaaaaaatttaattttctttttttttaggcagagtctcactctgtcacccaggctggagtgcagtggctcgatctcggcccattgcaacctccacctctcgggttctcctgcctcagcctcccgagtagctgggattacaggagcccgccaccacgcccggctaatttttggtatttttagtagagatggggttttgccattttggccaggctggtctcgaactcctgacctcgtgatccacccggctcggcctcccaaagtgctgggattacaggcgtgagccaccacgcctggccaaaaattaatattcttaccagccacgtgaagaatcactgaggctcctcagttgtgatgaccatgccttttgtgggagccaccaggaaccttggtctagttacagccatgatggcatcgggcattctcctttccctttggagctgaaggtaatcccttttccaatggccctcctgcttgcaggacagggtctaggtggggtcccctgactgggacagtcttcactccaatgtcctggcttcccacacttgaagcagcaaccattgcctgcaggtttgctgttaggcctgtttggtccatgggcgaagcatccccccgggtgaccctgaggttacagggcgctgcttacagcaactgctgtcattggagcatgctgtctgttctgttgtttgccacgctgggtcctttcagcctctccagccccgtccctattactaaataccccaaaagccacatcaagcatttgattaataggcatttggggtcctcaagccaatttctgtaattttattctgatgtcaggtgctgactggttaataaagtgtgtccctagtaaaatctgtccagcatcagcattgggggtcaatgttagtatattttgttagggcttccacaaggcaccccgacacaaatctgggttgtcatcctttccttgagttattccccttattttattatagttcacaggcttagcagtacattttttatttccttttttttttttcctttttttgagatggggtctggttctgttgcccagactggagtgcattggcacgatcttaaccaactacaacccccacctcctaggcccaagccatcctcccacctcagcctcctaagtacctgggactacaggcacatgccagcatgcctggctgatttttgtattttctgtagaaatggggtttcgctgtgttgctcaggctggtctcaaattcctgagatgaagcaatccacctacctctgcctcccaaagtgctgagattataggcgtgagccaccatgcccagcctggtacatttttttattccctccactaaacaagtcaccatatgatttatttttcttacatcagcctggctctgttgatcgttccaattagggtcattgtaaggcatagatgtggtccccacagtgtattgctcatggtcctcagctgatgaaatgccaagtgcaagagctcagcccttacaattggtcacctccatggccatgacagaagacaggcattcctagacccttggctgactgccttggcatgtaggcatccctggagccctagtgttgtccagggatccatggcccctgaggctttgaaaacggggaggctttcaaagagaagccggaccagctgtaggtttcatttgaaagtcacaagcctgctgatatccatctgaacgtttatcaccaagtaccacttggaagtagagatgattcagcacagccaataaacagggaccttgaagggacccattaagaatcagaggcctggatttggcattccagagggcagtatctaggaggcctatcttactgtgtccaaaatgttcactaaacctttgtgtgaagtaagaagaagcagcgtggggagagaaaattgcaaaagccggggtttttttgttttgtttttgtttttgtttttgagatggagtctcactctgttgcccaggctggagtgcagcaatgtgatctctgctcaccgcaacctctgcctcctgggttcaagtgattctcatgcttcagcctcccaagtagctgagactacaggcgtgcgccaccacacctggctaatttttgtatttttggtagagacagggtttcaccatgttgaccagactggtctcgacctcctgatctcaagtgatccgcccaccttggcttcccaaattgctgggattacaggtgtgagccaccgtgcccagccaaaaagccgagtttaaagagagacaggaaaaatgaaacagctcccaaccagggtcagtgtcttgccacagctggtcccttgggaaaacagaagatccttcccagaaaaaagtcacagtgctccttggaagccatctagccactgcacggtgtgggattttaccctccaccctctttagcctccagtcaggaaggacggtagctcctcagggctactcagtgtaggttgaaaccttcccacctccctctcatcccatcaggatgaactgggttttccagccagagggagcagaggcgctacagctgaggggagtcaggctgcagttgacgccaaggaacgaggaagaaattagcagtaactccagagagtgagaagactccgactaatattggagtaggatttataaactgccagtggttctagaattcggcaacgacactccagcctggatggccataaagatgacaccagtgggctgagggaggtccccaaacaccgatgggacctcgaccccagctggtgtccaggctcttgacatcatcacaagaaggcattcaaaggtgggtcagaaaataatgaaattacagagatttattgcaaagagaaaagcacacactcaagaaagaggagtgcaaacaaacacaaggagagtcacatgagaaaatacgttttactgattcttactcctgctggccctggctttctccttccttgtcttcctttttttctccccttgtgatcctttctctcttccatccccaatatatatgtcttagatagggaacttagatttattgagcatctactatgtgccaggtactgggctttgggcctcatggactccatctcacttagttcttccagcagcttttggagggatgttcattattattcccactttacagaagaggaaatggaggttcagggaggttaaatgatccaggtcacacagtcaaatggattggcgctgggaactacatctagatctgtttgactctaaaacactattctctcctttattttttgagggtccatgaagcactatcaaggagctacagaatgtcaattacgttcctctttggagtctttgttgcccaggctagaatgaagtgatgcaatctcggctcactgcaacctcccaccttccaggttcaagcaattctcctgcttcagtctcccaagcagctgggactgcaggtgcctgccaccacacgtggctaatttttgtatttttaatagagatggggtttcaccatgttggccccgctggtctcaaaatcctgacctcaagtgatccacccgcctcagcctcccaaagtgctgggattacaggagagagtcaccacacccggccctcaattgcatccttgagtacaaattcacataacacacatggaattcctgtttgcttatgaatcttcctatcaggtgccactgatctgctagtagaaatcctcccaaggaaaagcttgaagaatgcaagtgttttgctgtctgtctaggttttttgttagcctaaggagacacacaagactccagctgctcagccagcccctccgggagcctcagcctgtgagcaaagtgatggtgagcaggaggcagagaccacaggcttctgtttacagaatctctcagacaatggacaaaagagtagcaactttcataacaacttgacattgatagagtttccaatatagctgcacattttctactgttattgctccaatcttcttcatgaaaagtaaaagggggccgggcgcggcggctcacacctgtaatcccagcactttgggaggccgaggcaggcggatcacctggggtcaggagttcaagaccagactgaccaacatggagaaaccccatctctaccaaaaatacaaaattagctgggtgtggtgatatatgcctgtaatcccagctactcaggaggctgaggcaggagaatcacttgaaccggggaggcagagtttgccgtgagccaagatcgcgccattgcactccagcctgggcaacaagagtgaaactctgtctcaaaagaagaagaagaaaaaaaaaaagtaaaagagggcagggcatggtggctcacacctgtaattttgggaggcagaggcaggaagatcacccaagcccaggagttcgagaccagcctgggcaacatagtgagacctcatctctacaaaataatacaaaaataagatggatgtggtggtgcacacctgtagtcccagatacttgggaggctgagatgggagatcatctgagccctcagtggttgagactatagtgagctgtgatcacaccactacatcccagcctgggtgacagaatgagaccctgtctcaaaaataagtaaataaataaaaagtaaaagaaggttttggtcctcacttggataatcagcagtaataaaaacatctggaatgaatccactcagagcctttccaataaccagtctctctctctctctctctctctctctctctctctctgtctctctctttagcacaggttaaatttctgattgttccttgaggctttttttggtggaaatctatgttaaagcatattttatgtggcagaggaggccaaaagtgatggctgcatgcttacttattatttttccatgaaatagcattttagggatccaaatacaacctatttgatccacagacatgtactgatcacttccaaggctgcgtaaacatttaaagacgttctttgatgtggttagacaaagatgccctaagctatgggtgccagttaactagttaatgccaaatgtctggaggagccaatttgttggtcatttttaaaaaagatctgtgatgagcagtaagaggctatctgaagcattttgtctttcattttttaaaaacctggatcaagataccatgtgcaatatgaatatttttctttcaaaggcaagtattatacagaagttatctctatgggggctgggcatggtggttcacgcctgta

SEQ ID NO: 483 - DNA, 20001 bp, Homo sapiens
gatctttttactgttttcatagttttgccgtttcctgaatgtcatatagttgaaattatatagtacgtaacctttttagattggcttctttcacttaataatatccatttaaagtgccttcgtatatttttatgggttgatagctcatttttaagccatgaataatattccattgtctggatgtaccacattttatttatcctttcacctaacagaagaacatcttggttgtttctaagttttggcaattatgaataaaactgctataagcatctgtgtgcagttttttgggtgggtacatttttagttcatttaggtaaataccaaaaagtgcaatgctggatcacatgataagagtatgtttagttttgtaagaaacagccaaactgtctttcaaagtggctgtgccacctgtattcccataagcaataaatgaaaatttttgttgttccaagtactcaccagcatttggtgtcagtgttttggattttcaccactttcgtaggtgtgcattgataatgcattgttttaatttgcaatttccaaatgacatacgatgttgagcatcttttcatatggttactatctatatatcttctttggtgaggagttcaggtcttttgcccatttttaaattggattgtttgttttcttactgtcaagttttaagaattctctgtatgttttggataacagctctttcccagatgtatcttttgaaaatattttcctccagtctgtggcttgttttctcattgtcttttacagagcagaagtttttccttttataaaattccaatcttgccagaagcggtggctcacgcctgtaatcccagcactttgtgaggccaaggcgggtggatcacctgaggtcaggagttcgagatcagcctgtccaacatggcaaaacaccgcctctactaaaaatacaaaatttagctgggcatggtggtgcatgcctgtaattccagctacctggggagctgaagcaggagaattgcttgaacccaggaggtggaggttgcagtgagccgagattgtgtcactacactccagcctgggcaatggagtgagactctgtctttaaaaaaaaaaaaaaaaaaaaaaggaaaaaaaaaaacccaacttagattttttttatttttcatggatcatggctttgctatatctaaaaagttattaccaaacttaaagtcatgtagactttcttctctgagctgcaagtttttggtagatggtatttatcaaattgaggaagtttccctttatttcaagtttgccagaaggttttattatgcatgaatattggagtttgtcaaatgctttttctgcatctattcctatgatcgtgtgattttcctattttagtttgttgatatggtgaatttcattgattggttttcagatgttgaaccttgaatctagacttgtatatctataatatctcacttttgtaaggcattattctccattatgttggatttgctaattttttgatgagaatatttacatatgtgtttataagagatactggtttgtaatttatgttttcttctaatgactttatctggttttagtattatgataatttttccttcatggtaagagttaaaaatttttctttctgcttctaatttctagaatatcttgcatataattcatgtaattttgtcctgaaatctttattagaattcatcagtgaaaccatataggcctaatttgttctggtaggttattaattattaattcaacttatatagtaaatataggcttatatatattatcagtttatccttaggtgagttttgatatttgtgtattttaaggaattaggtccatttcatctaagttatcaaatttgcaggcatagagttgtttatcatatatctttattatcctcttaatgaacatgaaatctgatgacccttacttcacttctgatactgtgaccttgtggttctttttttttccttttttttcttgtttagccttcctagaggtttatcaatcagtgctattttcaaaaaacaagatacttgttttattttttctattgttttaatgtttacaaatgtattgatttctcctttgttattatttcttttattctttgtgttttgggcttaattttcttttaccatattccacaaattttgctatgttgcactttcatttgtcatctagttcaaactattttaaaatttctcttgagatttctttgatccatgtgttattttaaagagttttctaaaagtttctgaatattcgaggattattcaggtatttttcatcattaatttctagtttaattcaactgtaagctgcaaaatactgtgtatgatctctattattttaaatttgcttaggtgtgttttatggcccagaatatggtccatcttggtgaatgacctaagtgaacttgaaaagctgttgttgaatggaatattctataaacgtaagttagataaagtgcattgatagtgctgttcagctcagctatatctttactaatttttcggctgcttaatatatcaagtactgacagagatatgttgaagtcccctgttataattttggatatgcctatttttctctacaggtctaccagcttttgccttatgtatgttgatctgttgaagtacctacatttttaggattgttgtgtcttctaggagaatagtcctttatcatcatatgatagtcttatttaatcttttataatgtctcttttttttgaattttgatttatgtgaaactattctagatatttttaaattagtgatagcatggtatatgtttatccgtcttcttcctttcaacttatctaagtatttgtgattaaagagaatttgttacttgtagaaaacatctagttgattattactttttaataatccattttgacagtatttgtcatttaattactgtattcagatggttaatatttattttaatgtttattttttacagttcagtgactttttttaatgtttcaatagctttaggggtacaattagttttttgtcacatggatgaattgtatagtggcgaagtctgggattttagtgcacccatccatctcctgagtagtgcatattgtacccagtttctcgtctttcacccatttcctaccctcctcctttttgagtctccaatgtccactataccaccctgtcttggtgtacccacagcttagctcccacttacaagtgagaatgtgtgattcttcgttttccattccttagttacttcactaagaataatagcctccagttctatccaagttcctgcaaatacattattgcattctctattatagctgagtattattccatggtgtgtatgtgtgtgtgtgtgtatatatatttctcatgggttgatgaacacttaggttggttccttatcttttcaactgtgaattgtgctgtgataaacatatacatgcagatgtctttctgatttaatgatttattttcctttggatagatatccagtagtgggattgcttgattgaatggtaaatcttttagttctttgagaaatctccatatttttttccatagaggttgtactaatttacatccatgccaacagtttataagcattgtcatttcaccacatctgtgccatctttttatttttttgacattttaacgatggccattctagctgaggtaagtggggatgtcattctggttttaatgtgcatatgcctgatgataataatgttgagcattttttcatgttttttggccatttgtatatcttctttcgaaaaaagtctattcatgtcatttgcccactttttaatgggatcatatgtttttatcttgcctatttgtttgagttacttgtagatcctagatattagttcatcaatggatgcatagttggcaaatattttcctcaatctgtaggttgtcagtttactctgatggttatttcttttgctgtgcaaaatccttttggtttaattaagtcccatttgttttatttttagttttgttgcatttgcttttgtgatctttgtcataaattctttgcctaggccaatgtccagaatagattttcctaggttttcctctagaaattttatagtttcagatcttatattgaagtctttaatcaatcttgagttaatttttgtatatggtgaggcataggaatccagtattattcttcaacatgtggctatccaattttcctagcaccatgtatgaatagggagtcgtttctctaatttttattaattgcatgctttgtcaaaaatcagttggttgtaagaatttggcgttatttctgggttctctattctgtttcattggtctatgtatctacttttataccaatacatgctattttaatgactatagctttatagtataacttgaggttgggtaatgtgttgcctccagaatctttttgcttaggattggtttggttattctagacttttctggttttgtatgaatttttcaatagttattttccaattctgtgaaaaatgttgttggttgtttgatagaaaattcattgaatctgtagattgctttgggcagtatgatcattttcatgatattgttcttccagtcaatgaaaatgaaatgtatttctatttgtttgtgtcatctctgatttctttcagcagtgttttgtagttctcattgtgatatatttcacttccttggttaagtgtattcctaagtatttttttttttgtagctcttggaaaggagattaagttctttatttcattctcagcttgaattgttgttgtatagcagtgctgttaacttgtgtacattgattttgtaacctgtgagtttactgaatttatttatcaaatctaggggtcttttggaggagtgtttagcattttctaggtatgagaacatatcatcagcaaacagagatagcttgacttcctcttttccaatttggatgccttttatttccttctcttgcctaattgctctgactagatgattaatatttaaattattagtatatttatattaatatctaccatgttttaataaatgttctacttgttgtatttgttcattggccttaccttcctcttccattgagttccttctttgattttgagcgtaatatgtttcattgtatctcctttgttaacattaaaagtatatttcttataaaaagaattagtggttaccttagcatttctaacatatacttataactaatttaaggccatcctgcaaataccactatactgtctcaggtgtaccacaggtatcttacatgatttcctgaatctttcgtcccatctcctctgtcattgctataattcatttcacttttgtaatagtaattttgttgttattattattactttaaacagctaacttttagaatgatcaagaataagaaaatcaaaatttttattttacatttatttattctccagcactcttgctttatggatatcagagtttctaatttatattatttttcctctctttgaagaaaacttcttttaagatttctcgtagagaaagacttcaatgataaattccccctagtttttgtttgtctgagttaagtctttatttctccatcacttttgagtcataattaatttaactagacatatattctaggttggtggatttcttttttcaacactttaagtattttatttcactctcttcttgcttgcatgatttgtgacaagaagcctactgtaacttctatccttattcttagatgtgtattagtttcctaggactgccatagcaaattactataatctgagtgacttcatatgatgtactttcctctttgtgcctatgcccaaatttccctctttacaaggacatcagtcatttgactaggtctcaccctaatccattatgacctcatcttaacctgattgattatctctgcaaagatcctagttccaaataaggtcacattaatgggtaccaggagttaaggcttgaatatactttttcgttggagacacatttaactaactcacaacagtaggtaagaaagatttttttttttttttcttctctggcattatatgagatgttctcattgtttttggttttggctgtttaaataatatgatacatatgatatggctagttatttttttttaaaaaacacttgcttggtgttttctgaacttcttacatctttttttgtatatgattgattttggaaagcccttggccattattacttcaaatatttcttgtgctttgttatctctttccctagtattttaatcatgtgtatgttatgcactttgaaattttccccaaattatttgatgttctagtctctctctgtttttctcttttcacttgaatttggaaagttttattggcctagtccactctcagtccccagaaattcaattaaactaccacttaaatatttataccgctttatgattaaagtgatttctgctctaggcaagaaaatctcggctctgattctttcaattaacctctcttgtcagatatcatggtggtcaatttgttctaaaaccttatttctttgatgggtttcagaaaggtcgtggattctcacttttgtaagttacttttttcttgttttaaggatgaaagcaataacttccaagctcttcacatactggagttgcaactgggagtctctgttgttgtttctaaaagtttattacttcactccttctgtttgagtactcattattttaacaaaataaaactatcatcttcctcatacaacattcaatattagtggaaacacctactttacatattcattaatcttgtttttcctcctgtttcctgcatttccaactatatttgtaactctgtatatattcattcatttacatcaaactcttcaggttattcaactttacaaattcaaagtgagcaatagaaatttacaagtgtatttgttctaaccattcctgaactttctgctaacataaaggaaagatttcctcattcatttctcttcccatacgaaagtattatatacaacccaaaccaacaacaaatagcatcataaacaaactgtcaaaccaattaaattagaaacatgacaagaatacttactagcataattaactaatattttgaggttctaacataatatgtaaatataataaaattattataaaagcattaaattgctacattataaaaataaaagtaaacagttacctctcaacagaaattgttattatataattatgcaattctataaaagttagcagacgatagaaaaattaatgtctggtagaaacaagatattcaaaaactagaaacatggtttccttctctgtctctatgtctttctttctctctctttctacctctactaaaaaaaccagttagtcataaagatggaaagcttttttttttggttacaataacaataaaagcactaagtataaaagataaacaagaaaatccaaaagacataaatgttaaaatatatacaaccttattacagtaaataataacttagagtaatataatatattcctacaaaggtaggttcaaaagtcatcataatattattaatctctaaattaatacataaattaatgcatttccagttaaaatccaaatatatatgtttaacaatgtaatataatttgaaaatgtgtatgtgaaaagaatgtaaattaaaaaagataaaatttaagaataatggacacctggtcttggaagatattaaaaacttaaaataggactgatataatcaaaagcttggctcagaaactagcaaatgccaggagaacaaaatagacaatccacaatttttctatgagaactcgtatggcatttcaacttgtaaaatactgttttatttagagattttggaaccattggttggctgcttatctcatagaatagaaagttggaaccctaaaattaataataaaaaattagaatataacttctttagtaaactggaaaacccaaagtctatgaagtaaatgatagacagacatattgtattatcaaactgcaaagtgtgtatgacagatgctgcaaaaaataaacagaaaattgagagacagatgaaatatttacaacttatgtgaaaccttatacatcaataaaaatttactgatttggtaacaatgtatcacaataaaatgggcaaattatataaaaagacatggggaaaaaagatatataaatgagaagatcttcaatttatattttagttagggaaatgccagttaaatctgtaatttaattatttgtaaagccattggattgtcagttgcatcactgctgagtcttagcaggatatgaaataatacattgtatgaatttctgttaggaagaaatattgatatttcctggaaagtgctgaagaaaaaaatacttttataattttgatgatgacacaacagaagaaaaaacagtgctaatttctaaactgctaatttctgaatcagtttatcttgtcacctatttgattttcttggtctcagaccaggcacctatttgattttcttggtctcagaccagggcatcttaccctgtcatctctttgattttcttggcctctatcagactaggatatccctaatctacaatttttgtttgtttgtttgtttgtttgtttttgagacagagtctcactctgttgcccaggctggagtgcaatggcatgatctcggctgactgcaacctctgcctcagcctcagcctcagcctcctgagtagctgggattacagtcacctgtcttggtgcctggctaatttttgtatttttagtagagacggggtttcaccacctaattctataatctttagtggaaagatggttaaaataagagtctccatttgaagaatcttaaattacagtcaataagagtaaaaatatggaaaaccatttctacaaaatataatataccatatgggtcttgaatgtttgcatcattacatactgagaattcattatataatactctgtctgttgaggaataacaatgttgtttgtttaatccggaattgcatgtttggaaattgttctcagttataatggtaacgtttgaaagggtgacagatttagctctagcagtgctgcaaagcccctttcttagtataaaccatcaaaaaacagtaacaaacactaccattttgctgcttatataccttgtcttaaagaaggaaagggtagaaataaaaagatttcagaatttatgccaaacatatgttagacaaagtactataccaggaagtaatataaaaaaaataaattgcaggcttcctcaaataagaagagtatcaaaactctcctaaattctggtatattttaaagttatttatttgtttactgaaatatatttgtacttacactttattatgcttgttttggaaaggtaaatttgctccaatgtattgatgcattagggatcaattcgagcataataaatatttcacatttgtttaagcatgattcatttcttgaagtaaaattaggagaaagcagaatattgcactcagctaaatcagcctgtataacaatcaacaaaatacacagtagcacacacttcaaacatataccagttctcttaatccaatgcattcacaatcctaaaaatatgttctgctattcttcacatttgtgaagttttctttttttatattaacacaaaaatactgccaggcacagtggttcatgcctgtaatcccagcactttgggaggccgaggcgggtggatcacctgaggtcaggagttcgagagcagcctggccaccatggtgaaacaccatgtctacaaaaatacaaaaattagccaggcgtggtggtgcgcacctataatcacagctacttgggaggctgaggcaggagaattgtttgaacccatgaggcggaggttgcagtgagccaagattgcaccactgcactctagcctgggcgacagagtgagactctgtctcaaaaaaagccaaaaaacagaaacaaaagtaaaagcactcatttattattcaaaacatgtgcaagagtcctggttcaaaaataccatgaagttggtgcaaagagaagtttaaagtgttgaagtgaagcttgaaataataaaattttttaaaaaagatagaaaaaccaaaacctgagagaacatgtgatgtctccaagcagtggacataaagtaacacatatggcagactatgaaagacaaaacaatgaaaagcaaagaaacgtcaatagctataacaataccaagtgctgcaaagtcaataagaagaaagcctaaagaaatggaaagattatcaaccatatggcttgaaactcaaacaaccaaagaatcagaaacaagctctttacaaccaaagagaaagcactaattatatatgaggattttaaatggtaagcaccaaattctcctagaatgcctctttttagtgctattagggtctaagagtagtagtttcaaatacgagttcaatttccaaacccttcagctactgagcaaaactgtgagaacagatgagaaagttgcacaagaattaccagtgatgatgcagaaattgattacaggaagactatatattggaatttttgtttttcagtttcaatggacaagtatcatatataagcatatacctccaaaactatatctcaaaagcagaaaaatatatcctaggatttaaggctttgaaagattgcttaactgtcatatttgaccagaggaccatgagtttacccatccacatctggtgttaaaactttccatcatattttggatagcccttcttccattgcctcacaataattcactaccattctgagaactacttccacaagcaagtatcaggtcttttcaagatcaagtgccatatttttgaactgttgatgtgtttcttaaccatttagcacatgtaaaactatgttactcctttgaatgtagttcctatcaatattatttaatatgtcattgatgacattttgagtgttttgttcctaatctattttattcatgagttccatactttttattgcacatatttgcataatgcagtgatatttaggagcacatatgctgtgttataattaaacgttctgtacaattgaatctcagttcctctctgaatattctttttctcctctctcatgctcacattttgtattctcttctcatcagcaatgaccctctatttgttgacattctaaattccaaagctgcaactgactcaaatctcttagctaataagtaaatatagtcactctggcaaacaacatatggctaaaacaggtagttcttcatatttatgtattcaagtttatgtattcaagtatattcactttaagttcatcaagaaaacattttgttaattggttgtagcaataagaaattgtagtgaattgttattctgggccttatattaaaatggaatatcaaaaaagtattgaattgtagcatatactattctaagaccaaaaaaaaaattggtatggtctttatatagtttataaatgtaatacaataggatatttatgaaaacaatattgaatggaacatgtttcaaaactgatatttctattgtaaaatgctcaccacaaatataagaattttaagtggcacttttttggtgtattgttgccaaatacttccggatattttattgaaggtgtattatgttggtttgcattattattaaagggaaacttcactatgttgtttgcataaggagtaaaaaaactacacaatgatgaatattattaagtaacatgtcaagtacatggcataggaaaaggcgttggcttaaaaattagacactttttctgtcaacactgagaaagttttaacattggattggaggatttggactcactataagactaaaacttcttaaaaatcagtaattcataaaaaataataaatatgttttaaatatataagagggcattccaatcaacttgtgtacacattttctaaacatgatggataaattggttttatggtctgtggaacacagcacaaaatgagcgagcaatgcaaataagagtcttatctaagtccctcctctgtacccagggagacagaaaatttaattaaatggcttgaataaaataaaatatagcagtcgcaatatattataaacaagtcagctaggaaaatgagaataaaagtaagaaaaaaagtcagaatgagggctttttgattataacaataaaacagcaatagaactaacataactaactccatttttgtttaaataaccttttcccattcttacacataggccaggataattttagaacactaaaataatatataaaagcagcagtcatgtagtttaaaaaactaattctgaaattaaaggaaaagtatgtaaacaagtatgttttgttaaagacttagaggagcactgtgacctgacaaaggacaaggaaggaagtttccaaccttcttggacactcgctggtgcccagatgtctgtggttgttagttacctcttgatctcaatctctttctcttccctggccttaacataaaaagggtctaaattttgtactgacttaaggtgatattctaggacaatagtccactatctagtccactatcttcttggtttgctgattctccaaatatacccgttttcctccctaccaacccttgtgtctcaagtctggcttttgagcagtgagctgccaaacctgggtttggttacataatgatatatatgacaagtcaagaaatccctacggttataagtgaatagatgctgggtaagtgataggcagtttcaattatccctgtctcctattatttacatgattctacaatcacctccttttgagtgtggactggacatagtcacctgctttgaagaaatagaatacagaaaaaatgatttttctatgattaagttacaataaaattgttacttccaatttgctagtattctagatatatggcttttaaagtaccttgcagtttagccagaaaaatagttatttggtttattttaactgttgagaactctatttaaaattaaatagggcttatttcatggactgtctgaagtgtgtgtatgtatgtgtgtttcataaatgctataatagttttgaaaatgttaggcatattttattttacttcagaaatcttgaaagcttgaagagaaattcatatatatttttgagtgggactttctattcttttctgttattgtgtatggaaaacatgcatataaactcattctgtgattagtttagtttaaatcaccatgctctgtttttagatactgaaagtatgtttccatggcagttgactgtggttagcagaaacagagaagtcagctatctataaactcccatgatgagatgccagaaaaagtcaaactctgggaatacagggtagtacaatttattgattgacataaacttctacagtaattcatctgttttcctgcctgaattttttcaagctgcagcacagtgattatttaattgagttaattaatttattttagagacatggtctgactcttgctcaggctgttctcaaactcctgggctcaacaaatcctccagcctttcaagtagctgaaactacagatgtgcgccaccacatccagcttatttctggtcgggcaatgctggaaagatccatgaatcttacattactaatctacctgtttgttgttccagtatgttaaatctatatttcaataactgttgacttttgccagccttatgtctactctaccatcagtagcaagacaattgtgtagatcagggttgtccatagtagttaaaaggtaagaatcgcttggcatatgtattaatatagtaattctaaggtctgtctgccagaaattctgattctaaaaattggtatggatacccagaatctgtacagtagatgacattttaagttagaaatatttaagcaacacttataaaaatgatcaggaagaagaaaagaataacagaagataccatttaaaaaatgcatacatcttttggccaaattccagaaatttagactaaaatgttttgaataaaaaagtgttaaaataattttattaaattttatgcttcttgaacttcaaattgaaagcagaagaatattttggaaacattattttattattttcatgatctctaaatggaaatctgaaacaaattgattggaaaggttgaaatcattgatttttcaataagctgcataagcaaaaataaaaataataaaacaaagagtaatcccaattacagaccaaaacatcatttttcttttgggtagagcctgagatagggcatgttaaccaaagggcatggaattgggaactaaatgtgggcagccaccccatgaagagccacctctgcaggcataactcaacttgtgcctcctccaggagaaattaggtggattttgatatatttttagagctgttcttctctaatgcagctatcaggtcaatcactgcatccccttagagacagactgaggaaaagttcaggaaggccatgaatgtgttaaggggcaatccctcctgggaaataacagaaatggggagaaaataaagtgtttctttaacatggaagttagtcagtaaccttgtttgcttaccaaagaattagctgtttgttttaggtgtcatttctcaggatttcttcagctcctacacttctctaattctgaaacactaattctgaaaattgagccagtcataacaatttaattacacacacaaagggagcataacctcaagttaacataaaattatatgattggactaacatgcagttgttaccgcaattatccagtctgacactgtgcattattgcatttcacattgtattaatatgtataaaagacagagggtcaataaatatttagcagatgaatcagagttggcatctcaagaatataagggtgatttagaaattatcttaaataatctagaagaagcgctgtgtgggttctgtagagaaaacaaaggagaggaaattgtttaccatccactcctcacttggcgtattcagggaatatctagtagctttttgatgaggcatagagacagaagagcatggggagctgcttaagaggagtcctaaaaatgtgtccaggacagcttgctggagtatttatgacaaacttaagaatgttctcctcattttgtgggccagtagtgttcaaaatctttttcatgacacttatttgtaaaagtttaagaatttaaccccaattatttacatttatatctctatctttaaaaatatagataacaagttataaacatgtgtgtatatatataatactgtatatgtaatactgtcaaattgtctaatgctgctaataaacatatttttcatctttaaacattaacaggcaaaaagatttttgattaaatatacaaacagatgccccttgacttatgatggggtcctggtcccaataaacccattgttagttgaaaatattgtaagtcaaaaatgcatccaatacaactaacctgctgaaagttgtagtttagcctagcctaccttaaacatgctcagagcagttagagagcctgcagttgggctcaatcatctaacacatctagcctatcttatattataataaagtgtcaaaaatcctatctaatttattgaatactatactgaggcatagtttctactgaatgtctatcacttttgtaccagtttaaagtaaaaaaatcgaagttaaaccaacataagttatggaccatctgtattaagtttgtcacccacccaaacatgggaaataatagtaaaggggtttttgaaaagacaaatccacaaatacaaaaagaataaaagaggagtaagcaacattttagagggtagagaacatatggaagagtggtaacttacttactcattgaatccatggaagacaaatcctaagctcccatggggaaagccaagaactaacttgagttttgcttcagtactcacaaaaggaccatgaactcatgccgccattaaatctgtaagtgtaaatgaagacactcagccattttaataaatggtcagagtacaggatagactacaagacctctccaccttacttagtgcagttggagcagcactcttcttctccatactcatagaagactgaagatttaatactggacaggttaaaattgaaagactctcatctggatatactagacaaattaagaaggatattatcctgaaaacagaggtgctgactaattccaaactgtactgagattccaaactcccttttgtctcttatcatctcatagattattggcaagcagtcctgatccccttatgcttacctgggaaatataatgacccctgaaagaaaatattaaatatttttatatcatggattatctaaggaaacagctctacctcagaatctattaagccaaaatttaaaaagttccttcagtcattctgaaattccaataagtgagggacttcaaggtagctgactagaggtatctagcatttgccttgttcacaaagaaccaaaatagggagatgatcacacttgaaatatagtgcctaagaaagaacaccagaattcaacagagaagtaacaggaagcaaggaaagagagaaaagtcaggtaggccaggcttggccaggagcactgggtagggtctgcaatgtgggggaagagcaactcagacatccccagcagtccacatccccaagtagactcctgtgattctagccacaggagagccccttgacagtcgcaggtcctgaaaccaacatagaaagctacctagagactacagaaaggcattactccagagagagctcatggtgaggcccatacactgccaaaacctaagcagctgtggcacagcaccattttgggagccaagacaccaccagattgcatcccaccctggggcctaataacatacattttcacatccctggagccccactgaaatccgctgtccccagccactgccattgctggctgctgcctctggaagcctaagcacaagtcactggcagcacccccgtcaccctcatcgaggtcaatatgcatttatatgtaccttgagaataagctaccatgcctgcagctgtcacctggggccaaaagacacactcctcagccacctggctacaagtgctgccattaaacaaccctcctctccctggcagcagggacacagtgccctcacatatgccataagggcagcaacccctcctcaccactgatgtcttccccacatgagacttcactggtacctggagatcaccccaccctgtttaccacagccagcacccacatgcaccgctggggcacctgagacctactcctcccttcctggcttgaatttccagcattcaagaatgtcatttgaaggcttgggaatcactccattccatccaccaccattggccactgagcactcctcctgggggcctgaaaacaagtccactcttcctgccactacaccagcgttagcactaaactgcacatgccaccagcaggcctggggacttacccacacagcagttgcagccattgccaacaccagtgcagatcacttgggagtcaaaggatcgtcctgccacagctgctgctatcacagatgccatgtcctctgcccagggccccgaagacctgcccacctgcatggaccaccactgtcactgatagcacctgaacaagtcacctgtaccaagtgccagagcctgctactctggggcccaaggacatacacactagcattcctgctaccactggggactgagattggcccacctgatgtcagtgtcctcagcaaaacttcaccacaacttccactacagccatacaatcccttagagatagtcaatattagggttgcacagtgaagtttggttttaggcatattagtccactaatttcatggcacatggatggcctctagaaaaatgaaagtatgtttgaaagagaacatttctagctgaaatggccaagatgacttaagggaagaggtgaattgctcagaaccttgagtggtggttcgtttgtgttcatggatggaggtgggggacagggagagcttaaagaaatctgcaatgcgagaaaggggccaagacagacaaatagaaacagctcccatctgcagctcccagcgagatgaacacagaaggtgggtgatttctgtatctccaactaaggtaccaagttcatctcattgggactgattaggcaggtggcgtgacccatggagggtgagcagaagcagggtggggtgtcactttacccaggagctgcatgaggtggggggacctccctcccccagccaagggaaacagtgagggtctgtgctacctgccagagataccgcgcttctcccatggatttgtgcaatctgcggatcaggagattgcattgtgagtctataccactagggccctgggtctcaagcacaaaactgggataaccaactaaccaacgacagccactcccgccagtggctgttcaggctggcactgagctgcaggagtttatacatactccagtggtacctggaactccagtgaggcaggagaacctcacaggagtggaaaggctaaagccagggagccaagcagtcttgatcagttggtcccactcccatggagccctgaaagctaagacccactggcttaagacccctactaccagcacagcagtctggagtctgcatgggaggactgagtttccaggggaggtgcgactgccattactgcagctgtagttggtggttttcccctgacagtgcaaaggagactgagaggtttgcagtgggtggaattctcccacagtgcagcaaagaggctgtggcaggctgcctttttaggttggacccagagccatccttcctcactgggcaggccatccctgcaggaattccagcagctctagtcaggggcttacagacagaaatctcatctccctgggacagagcactgcaggggagggtgcattgcgttctcaagttcagcagacttaatctttcctgtctactggctctgaagagactggctgatccagatgaggggaattcccccagcacagtgcactagctccactgagggaaagtcagactgcctccttaagcaggtcttggatcccatgcctcctgacttgactgggtgagacctcccaacaggggtcaccagacacctcatataggacagttccagctggcaccaggtcagtgcccctctgggatgaagcttctgaagggaggagcaggcagcaatctttgctgttctgcagcctccactggtgattcccaggcaaacagggtctgaagtgcccccagcaaactgcagcagcctgttagaacaaaaacaaacaaacaaacaaacagaaaataacaacaacaacaaagaccccacaaaaaccccactgaaaggtcatcagcctcgaagatccaaggtagataaatccacgaagatgagcaaagacacggaaaattgcaaaagccaaaatgtctcttctccaaatgattgcaacacttctccagcaagggcacagaatcaggctgaagctgagatggatgaactgacagaagtaggcttcagaaagtgggtaataatgaatttctctgagctaaaggattatgttctaactcaatgcgaagaagctaaaaaccatgataaaagattacaggagctgttaactagaataaccagtttagagaggaacaaaaatgacctgatggaactgaaaatcacagcacgagaacttcaagatgttaacacaagtatcaatagtcaaatcaatcaagcagaagagagaatatcagagcttgaagaatagctggctgaaataaggtaggcagacaagattagggagaaaagaataaaaaggagtgaacaaacctcaaagaactatgggactatgtaaaaacatcaaacctacaactaattggagtacctgaaaaagatggggagaattgaaccaagttcgaaaacacacttcaggatatcactcaggagaattttcccaacctagcaagacaggccaatattcaaattcaggaaatc

SEQ ID NO: 484 - DNA, 20001 bp, Homo sapiens
ggaataagtaacattgctccagaatttgttggggtttttcttcccctgaatttggtagtaagctccacaaaggcaagaatgacaaccatcttgttctccttgtttctttggagcataacacaacatgtagcacgtggttggctcaataagaatttgttgaatggtggccggatgtggtggttcatgcccgtaatctgagcactttgggaggctgaggtgggaggatcgtttgaggcctggagttcaagatcaacctgtccaacatagtgagacccctatctttttttttttttaagtgggttttcttgaatggcacacagaaaataaacaagcaaaatgagagatcagagatgctggaaaagaccagggagatctgatggttaaatcagatcatctaaatgttgaggagacatttggacatctgatagagtttggcattgaataagtgataatacacagaaaactgaacaatggcaaaaagaaaagtatcaattctaagggaaaagattcaaatcaaaagccttcaggaaaggataagtcatcatggtttactgtatagcttagcttaaaatgacacagaatagtggagtagcccaaagggccatctaaccacactgggaagctgagcaggggaggagtgcgtatatgcatggaggagacttgtcttcaccctcagcagctgagagcagacaggctagacctggacaatggagcaggagccacacagcctgtgaaacatgtgccggggaatgtagaggctgctgtttcacatgacagagccgtcaaaccctggctgtttaaaaggggtacatacataattttaatagaaataaaaaccaaaaagaaaaaaggcttaagtgagaaaggcaaaaccattacaatttttagaggaaaacatgagagtaagaacagaaaaatgtctaaaggggcaaagtgctaaccataaagaaaaagactgataaattcatcttgataaattttttatcaaaaggcaccataaagacagtgaaaaaacaaggctcaaaatgggagaagataattgcagcacatctgaccagcaaagagtttgtatccagaatatataaagaacttctatgagtcagttttttaaaaacacaatttatatttaagtctctttaaaacaaatagataattcatagaaatatggtgatatggtttggctgtgtccccacccaaatctcatctaaaatagtagctcccataatttccacatgttgtgggagggacccagtgggaggtaattgtatcatggggtgggttttccccatgctgttctcgtgatagtaaataagtctcatgagatctgatggttttataaagggcagttcccctgcacaccctctcttgcctaccgccacgtaagatgtgtctttgctcctccttcacgttccgccatgattggtctgcacccaaatctcatcttgaattatagctcccataatccccatgtgttgtggagggacctggtgggaggtaattgaatcatgggggcaggtttttcccatgttgttctcatgatagtgaataagtctcataagatctgagggttttataaaaggcagttcccttgcacacgctttcttgcctaccatcatgtaagatatgcctttttctttataaattacccaatcttgggtatttcttcatagcagtatgaaaatggactaatacacatgggctaaactcatgagcaggcaactttatagaaaaacacaaatagctcataaacacaaaatatagattgagttcattattaattagggaaatgccttttatggatagaataaaatacctttttacactccctggattggcacaaagttttgtctgacagtctaaatgttgacagggatgttgattaactggaattcacacactgcttgaggaagcttgcattcactctgtcattcagcacttctgaaaagtgcacaccaataatcagcccaggaaggttcacaaaaacatcttcagcaaagatgtcctttcaccctagcaaagaaccagaaacaactcaactcaagtgtcctttgacaagagaatgggtaaaaagcaagtggtatgtcatgcaaaagagttctagacagaagggaaaattaaagaacatcaaagttagtaagtcttcgagatgatgttgagtaggaaaaaaactacagaaaatatattgtatgatactttcatcataaggttcaaaagcaagccaaggtaaacatgttgtgcatggacacctagggacccatgtcattttaggatcaaacatagatggatagatgatagatagagagatggattttttttttaactcaaaatagtgggagctaggattggagaagagacacttagctttgaaagtattgtcaaatgtagtgacctttctagttcattcaggtgctgggttcaggggtattcattttattatgcaccataatttatgtgagatgttttattatatcaaatatgttctaatcttacagtaagcagttgttaaacagatttataactacatataatgtgtgggtcttatgaacaatgctgctgtgaatatcagcacccaactacacttgtctctcacggccttttgtaagcctgcttagttgaggagtttcttccttatactggagatgagaactcaggtaatgcctcgactgttctgatcactgttaggggattacacattctacccagctgacttttcactgaaagcccagtctccactcaataagtaaaagtgtaataatcgaaactcccaacttgagttccacttaaaatcttctctcttcccctgccaggcctctctgcaccacctaggggagcatagtcccctctgtccctgcctgacagggctctcctcctcagcagcacagggaggtgtctgacccatctgtgtgtgtgtgtctatgtggtagggatggggaccacagcttgtcgtcctgccctctcaccctggctgttcattgtctcaagctgactttcttgggtgttttcatggcttcttctgaggcctccctctggaatattggatcgtaactccagcaatgcaagcaataggttttcctccagcttctggtcctcctcctcctcctcctccccaaatctggtttctagcagtcactccactgagactcagagtcttcttggcccagtgccagcctcttgcatgtcccaaatcttgtcctcaggaaacacttatgcatcctatgctggggtgaactcttaagagtgcaggatcacctcatggccacagcctagctaggccctgaaacccacactcagggtttctcagatatgagtcagccccaggccactgaacctctcccattgcagggaatccctgtcaagtggtgaaagccagcatctagacctggagtcacaggcacctgtagcataactcctcctgaaatggaggtttttctttagagattggtccatatcccttatccctggacttctgagaagggtggacaacctgtggactggacttgagtctggaatttagagaagtgtccatagtagggctgccagatgaggcaaacacaaatacaggatgcccaattaaatttgaatttcagataaatgatttttaatgtttgattctgtcccatgctaaaaattgcccactctttgtgataaatttaaatttattggtccattctgtactttatcaaggacacacgcaggaggaacagtagcacaaaggcttcccggtgccttgtgggtgaaagaaaggcttccagggaaaggagagaaacacccagggatcccggtgacgtcgggaagcagcacccagaccatgtaaggacaccgcctgcagggggagactcaaggcctgggaagattttctaatctgtgccttgagtcgggtggggggattttctgggaaaagaaaaccagacacagtaggacaaatattgtatagtttcacttatatgaaattgtcagaataggcaagttcgtagagacagaatgtagaacagggctttccgggggctagaggagaagacaaggagttcttgcctagtgggtacagagtttctgtttgaaatgatgaaaaacttctggaaatagattgtggtgacagttacacaccattgtgaacataattagtaccactgaactgtacacgttaaaatggttgtatgttatatatattttaccataataaaaactagggggaaaaaaaggaaggggagattgtctcaggctggctgactttccctgcatgtacgcacatcttcacatgtgcacacatgtaaaacaaaaatgaagcaaaaaaagaaattctaatttaaccagtaagcaatatgtaaaaggaaatctgaatgtcattacaattttaccaggttcagaataaaataccatccttcaaactgaacaaattacttattagctgaagagagctgaaaggaagtttggaattaacagtctagattttctcactaatgggtccaagtcattgacctctaaaattatcttagaacatgccctccctccttcctactttctggaaaactatcagtctcctaccctatgcttgcccatagagttccatgtacaaatcacaaatctgcatttgccgttccctggaagcccttacattcccaagggctggcctcatccactgccaccgaaaacagccccagttcaggcaaagcaatcactccctctccctctctgtcattcctttcttttcctttcactatctctctaccctcctcttccccactctctgtttcctctctctctctgtctctctctctcccccaccatctcctctctctttctctccccctgccttctctgtctctctctctgacacacacacacacacacacacacacacacacacacacacacacacacaccgcagcaacattctacctcagccagagttccaggccaataggtgtggactttgacttccagattcctctggcaagtgtcaacatcagtcctggtgctccctggcagagaaggacttggagtcaccttggccaagaagctgtctggaggtcacagtggcaccgcccatcggccccttggccggagctaggtgagggcagattcagcacagcagcaactctccccataaaaaaatccctcagtgtcttctctaacccttcttatactccttgtgagttttagagccacctaaactcttcttttttcccaatacatggagacaaaatttacataacatacagttagccattttcaagtatacagttccctgccatttggtacattcacagtgttttgcaagcaacacccatatcaagccccaaaacattttcattacccaggaaggaaacctgtcgtcatggaaccgtcactcctcacatccccttcccctcaaaccctggcaaccccaaaccgttcttgacagcctcctttggcatttcctcattttggtgtcagatctcacagcagaatttcttacctattatatccagtgcctcagtgtgaagttccggtttaacttcttgttaccacgagcccactatcttgccccaataataccctcccccaattcacaaacacacaagcattccctcctacagctttgggcctcctatctgagtccttcaggaaagaagtgcttgtaactcccttggcagtgagtgtagacttggtccaaggaagatgagcaccagtcagggcagctggtccctcttctctccctggccatcagcaaatcagcactgcccatcgatgcccaggcaatgggagcgtcgaccagcagaggacacacctgaatttctctgcctcatgggagggtggctgctgtgttgcatttaggaagaagctgtgcaagattcatactgttttgctaatgttaatcttgtgggcataataaacgtcgtacccacacttatttttctagatcagacaagattgggtgtgttcagggtggtatggccatagaccccacacttttttttttttttgagacggagtttcgctctcgcccaggctggagtgcagaggtgcaatctcgactcacagcaacctccgcctcccggattcaagccattctcctgcctcagcctccagagtagctgggattacaggcatgcgccaccacgcctggctaattttgtatttttagtagagatggggtttctccatgttggtcaggccggtctcgagctccggacctcaggtgatccgcctgcctcggcctcacaaagtggtgggattacaggcgtgagccaccgcgcctggccgaccccacacttagttttaatacacttctaggcaaggctgctgcactggtctggggatcacactttgagtagcaaaggactaaattgcaataactgccggggggggagaaaaaaaacaggatgaactgcttcctcctggctcagcagctagggagtcactgaactaacaaggggatggggtggggataagaatgttccaggcaaaaggaacaacatgcccaaaggcctcaagcagaaagagagcttcaggtattgaagaagtagaagtagctctgtgtggctggggagtgggcataagatggagcagaagaatgccaagtcctattcctgggtctgaatttccaggagcagaagccctgtcccctctagaaggtggatatagtctggatatttgtcttcaaatctcatgttgaaatgtgacccccagtgttagaggttggacctagtaggaggtgtttagatcataagaactggatccctcctgagtggtttggtgccctccctatgattgattgctctattagttcatgtgagagctggttgtttaaaaaagcgtggcatctctctggttccctctcttgccatgtgacacaactgctcccccttcacccttccccatgagtaaaagcttcctgagaccctcaccagaggcacatgccagcagtgtgattcttgtacagcctgaaaaactgtgagtcaaataaacctctttacattataaattacccagtctcagatatttctttatagcaatgcaaaatagactatcacagaaagttggtacggaggtgtagggcgttgctataaagatatccgaaaatgtggaagtggctttggaactgggtatgaggcagcggttggaaagagtctggagggcccagaagacagatgagaaaaggtttggaccttcttagagatttgtaatgtcgttgtaaccaaaatgtggacagaaatatgtacagtaaaggccagcctgatgaggtctcagatggaaatgaggaagttatggggaactggagcaaagatcacccttgttatgccctagcaaagaacttggctgcattgtatctatgtcctagggctttgtggaaggctgaacttaagagtaatgacttagggtatctggtagaagaaatgtctaagcagcaaagcattcaagaaatggcctggctgcttctaatagcctatgatcagatattggagcaaaggactgacttaaatttggaactattaaatcaaactaaaatctggcctgagaaagcctcctcactcccatacttgagtccttaaggatgaaccataacctaactttgtaggtaggacgactgaaaacctaacttagaaggatgcttctgtagcaataactgagcctcagccaatctcagcagccatacttcagtactcacaggcagcctattgttcaaaccatgttcaaataaggcaaacaccatgctgtaaccaatttggctatttctgtacctcactttggttttctgcatgtcactttcctttttctattcataaggttttttccgaccacatagcatctctggtgttgctctgaatctgctgtgattctagggactgcctgatttgtgaattgtctttttttttttctcctcaattaaattctgttaaatttagtttgtctaaggtttttcttttaccagatctggtgttggaagtgcagtttgaagtaaaactctggtgacctacaggaacaccaggtgaccaggccagttgtgctcactgatcttttgattgtaactggaggttgtagatgggttttctcttggattcagagttccactaatttgtgttctaattggagctctccaagtttatttgagcaatatttaagtggactgggttcaggatcaaatttgaatcaattaactggattgggttctgttagagcctcagacctctactaggcactttttttttttttttttttttgataatgggtttgtctcaatccaaggattctaggaatctaccttctgggactccatctaattttgtatataaaattttaggcccagaatgtgtgcatctttagaaaaacagattaaccttactagagaaaagatggccacaatggggaagttttaatttgtataaaattgtttatttgcaaggcatattagaaaaagggggatcaaaaccccacaaaaacattgggatatagtctttcattggtacatggaagcctctaaaagactaaacgaatgaaaaattccctccttaaaagatactttgcaaaagcaaatgaacagtttaagcaacaggctaaggacatgatgaaagagaactgtactctcactgaactaaccccaactgattcttctctttatccatctctacctacgtactctgagtctactaacctttttgctagatcaacctttcactctgaagatgatgaaaaaggaggaattagatgtacgcctcacaaaggaagaccttctgattatccaggcctgcctgctataaccactttcactccatggtctaaaactgagcttagagctattttagaagacttccctgatctaagagaaaatcctcaaaacttgactaaggagtttagactcctcataggagactatgatccaggactccctgacaaaggttcatatgacaatttattcatatgatatggaggcctggtgaagctcaaaaatggatggcagcagcagaatggaagaaacctgagaaagatattaaaacccccccccccgcaccccccccccgcaccccccccccccacacacacacacacaaagcctcctcatgagaaggcccaacaggagctagaaatattgctgaaaatcccagcctgggcaacatggcaaaagcctgtctatacgaaaaatacagatagttagctgggcatgatggcacatgcctgtagacccagctacttatgaggctgaagtgggaggatcacctgagcctgggagcttgaggctactgtgagccatgactgtgccactgcactccagcctggatagcagagcaagaccctgtctcaaaaaaaaaaaaaaaaaaaggaaaaaaaattgctgaaaatcttttaaattcaaatactaaattttttccacaaaagttgattggtacatcatacaatcttgtaaaccaaaaaaaaaaaaaaagaatgaaccagtgtcagattacagaacttgcttagaaataatgtgaaacattctgggcttaaagtactaacaaggagtatttcctgcagggactgaaatggtattaactactctatttataaatggacttcatcctgaacttagaaatttaattagaaaacgtaaactcggatgggaagttacagccatgactgaattggtggctctagctgaacattttgagaggactgtagagcaagaaaaaacccaaaaggctaacaagcttatgactcttcaattacaacagttacaggggccaagaccaaagggatcttctcattctcattttaaatcacaaccaagaggtattagaccaagaaattcttcaccctaagatgtctgccttattgcaaacaaccaggacagtggaatagggattgtgcccttttatatcagcccaccaatgaccctccctttaggccagcctgtttcaccactagagggagcacaagagaccttagctctcctgaagataatcagcattgaagcggctctgagggatttcacagtatattgctcctcataatacccttaaaagaatatggagaaacagaggttacagtaactggggactcatgtatagtcttggtggataccagagctaccttatctgccactaccataaaacacactttcataagccaacagatccctcagagttaaaaaggctatttctgtggttggggtttcaaatcaaattcaagagtttcccatatctgaacccgtccaattgactttggggcatttttcaaaaaatcacactgttgtactatgtgatagtgctccagtaaatttgctagagggagatttactttcaaagctgaaagggcatagaagactacctattgggtacattgtaaactgcttgggaaatgggcacactaaaatctcagaaatcagcagtaaagaacttgtccatgtaaccaaaaaccacctgtactcccaaaactattgaaattttttaaaataaaaaatttttaaaagtggggagggtgtaaaattttccttggaataagaatcagtttcctgattctcctgaaccagaattgttatgttctctataggcagatattaataggatcgaaactcaggcctgtaatgcctgatcttccaaaaatacctaaatatttatgggcctcttcctcaactgatacaggaagaatttaaagtgtgtcacctattaacctccaaatagaccactctaaacttttgcctaaagtacccaatatccactaaaactagaagcaattcaagggctcttgccaattgtaaaagatttcattagacagggacttataattctatgcaccagcccttataaccctccaatcctactggttaaaataaaccaaatggatgaggttgaagatttgttcaagatttatgggcagttaacaaaattgtagtagcaaggtttcctatagttccaaatcctaatacttcattatccaagatacatgctgattcttaagtggttcacaatattagttctctgctcagcctttttttacaatccagtttataaggagagtctatgcttatttgccttcacttggaaaagtcaacagtacccccagattgtgatgctgcaagggtttaccgaagcctctttgtgttttcccaggcattgcatcaggacttaatgacattatagtttcctcaaaattctactctcattcagtacgtggatgacttactgtatgctctcccactaaagagtactctgaaatggactcagtttaccttttacacaactcacacatcaaggtcacaaagcttcagtagaaaaacttcagttttcaaggggaaaaagtccattatttgggacattatttgatggtgtttccctctcacctaaaaagttaaaaactcttcaaaattttccttggcctgcaaccaaaagataattaagaggttttcttggacttgcaggatattttcttggacttgcaggatattttcttggacttgcaggatattttcttggacttgcaggatatattcttacacttgcaggatataaaattcctgggttctgaatttttccttaatagcctcaccgttgtatgagctcactaaaaaatgctgtaccagagcctttaccttgggatgatagtcatgagcaagcttttagctaaataaaattggccttataacagcctccagctttaggacttccaaattgcactaaactgtttacctaattggcttatgaaagtaataatcaggcatttaggagttcttacccaggaacatggggagaaacataggcccattgcatattatagcctgcaattagacccagtagctaaggtatatcctaactgtttaaaagcagtagcagcagcaaccaggctgaaagaagcttcagctgatgtggttttaggaaatgaacttaatatggaagtcccacatgctaaattccacccaaacccagcattttttagtaagtagactaacatcttatgaaatgctctgtctccctctaatctctatctaaaacactgcaatttacttaaccatgcccctgtattactgctgcctgatgatggtgaagaccacaattgcataagtgtagcatcagaaatagtggcccctcatgttgatttacaagttagtccattggacaatcctgagctaatacttttgttgatgggtcctatgccaaaagctcagaaggaaaatatcagctaggatatgctgttaccaaaatgagttaatagagaagggaatccttcctctattagtcagctctattagtctaagctctataagtcagcttaaccctcgaagatttttgccctcacccgagcttgtcatatagctaaagacaaaccggtaagtgtttagacagatagtagatacgctttaggagtagtacatgattttggcatgatagggaaactctaagggtttctcacttctagtgggatcaccatcaaaaaaggactccaattagataaaccactagattgctgttattgatcgaagctcatacctgcagaactgaacctgaatatcaagggaatgcttagcagatatttatgctaaatcagctagtactgaaactgttcagatatgcaacatgaacgaacttcgtaagattaatccaagccaactaccttacaatgacctatttaataaagaatgcaatgcacctcatttggaaaaacaaaactggtatctaaaaggatataaattcaatgttaagtgcaaacttgcagagggcctagatggctgcctggtctttcccgagtctttgaagcttccattgtcaaaagctttgaactccacaactcatcatggaacagaaaaattcatccaagttgtgaaaaaatacttgtgggatgactgttccaaaattgctagaatatttttttttttttgagatggggtctcactctgtcacccagggtggagtgcagtcgtgcgatcgtggctcactgcaccctccaccttcctggttcaagtgattctcctgcctcagtctcccgagtagctgggactacaggtatatgccaccacgcctggctaattttttttatttttagtagatatggggtttcaccatgttagccaggatggtctcgatctcctgacctcatgatccacctgcctcggcctcccaaagtgctgggattacaggtatgagccactgcacccagcctgctagaatattttataaccaatgttggctagtcaaacccatagtcctggaaaaacgaaagattcaggtggtgtattgtattttcaacacctaatggaccatttgaacaattatacatggacttcattcagttgccaccttcaatgtgggtctcagtatgttcttgtaatagtttccatgttttctggttggttagaggccttcctgtgtaggaaagctgatgctgtgacagtagctaagaaaatattagaaaatgtgttttctttatggagcatccctggaaaaatccccagcaatgggggaattcattttattaggcaagttataaagcagttaaacaaggttttatggacacaatggtactaccattatccctagcacactcagtcttctgaaaaggttgaaaaaacaaatgacatattaaaactgaaattggcaaagttaactgaatcagttgggttgccttggccaaaggtactatcattggatttaatggcagtcagatccactcactaaaaaacagaagtggaccccttatgaaatagtcactagaaggcctatgccccagtagtaaaacctcttgcatctttctctctctgaaattctgatataagtaagtactgcaaggccattataccaagtgtgctttcaccagataaaggaagcttttcaagatccaccaattgaggataatcaaaccttccacagtctagaacctggagattctgtcttctggaaatgacatcagaggaaggctgctcttgacaactctttggaagggactgtgccgagttcttctcaacacctacactgcagtgaagcttcagggccttgaaacttgggtccacacctcacaactcaaaaggacctcttcagactcctggaactgtacatctgctagagactttaaggtaaagctgtctaaggaaaaatctccagagcagatgacattctagttgtggacagctttcccaagatcacagatgaagacttctgtatcatcatgaaagccttacatttttttcttttctcctcatttcctgttgccctaattctttctttttccctacagaaaaatccatgggaccataaccagtggatgcctttagcttgagcatctgctgtagcacagaaccagagtttgtggattattgggtttgttgtttattgccaaaaaaatataaggaaacaattccactaatgccagtgcctctccatgttcccaatgagagtcaccccaaaattccaagggaaggatggaaagctatccttgatattctgaacaccactgctacttgctttcctgcactcactaaaaagaacactttaacttttcctttttttttttttttctttttttgagacagtctcactctgttgccaaggttggagtgcagtggcctgatcttggctcactgcagcctccacctcccaggttcaagggattctcctgcctcagccacccaagtagctgggactacaggcgtgcaccaccgcatccagctgatttttgaattttttgtagagacagggttttgctatgctggccaggcttgtcttgaacctcctggcctcaagtgatctgccagccttggtttcccaaagttctgggattacaggcgtgagccaccacaccctgccttaactgtttcaattaataacctgatcattaccaaagtatagaaaaccaatccaagtgatgactgcaaaagatatattgtgctttcaggcatcatgtactcaagatttgggatttacctatgtgagtacaagtaattgcttgtataatgtcaccagattaaattcaacagggtctctttttaccaaatgttttatatacccttacaacatgctataagaggggcacaaaaaggtcaatttctcaatggattttgttcagcagctatgcagatttattaatgaacaaatctaactgaaccctgctcaaatgcaactaggtagccctgtttttcaactcccaaggacctattttgggtctgtggataatctgcatatttcattctgcctcttcgttggctcagatcttgctatttggtctggctcactcctgcctttcaaatagtttcacctaaaaattctcctaacagctcttatgattggaggccaaaatagtcaataactgaaattagcactagctttgaaatagacaaagataagctagtttccactgaggaaagattccagtggggttcctgggggctcactcttggtggtagtgggatactagttgtatggaatccaaagctaatccatatgtggggtcttggattttatagccaatcaaacatcccagtgtttcagacaggtagacactactctccaaaaggtagatgtggcctggtgcaatggctcatgcctgtaatcccagcactttgggaggccaaggcaggtggatcgcctgaggtcaggagttcgagaccagcctgcccaccatggtgaaaccctgtctctactaagtacaaaaaattagccaggcatggtggcacgtgcctgtagtcccagctacttgggaggctgaggcaggagaattgcttgaacccaggagtcacaggttgcagtgagctgagatcaccccactgcactccagcctgggtgacagagcaagaccctgtctcaagaaaaaaaaaaaaaaaaaaaaacaagaggtagatgttacagttaatggaacatcatacagcttcatatctcctttttactcaagctggggcctgtgtttggtgttgaacaaaatagaatgctgcagttatctctctcctgattttgttactacagaaagcttaatgtaaaggtggctgatactgctgtttccttagacactgacaccaaatacaataaagaagtctctcaagaggaaaacatggtgtgtttacaggagcaactaacagttggtttgtaggcatcctaaatggtggatggcaagcttgggtttcccaaaggtttctagtctttatatgtcttctagtaggtgtccaggttagtatggcttgtgttaccagagcaacaatgaaaatggctacatctttaaatcaggccactttacagtgaactatgatccttaattgctaccacatttcaaacaagaactatgaccaattaaactttactgttgttgaactgcctatgttgcctgaactttgactggtttaagttggtttcatttatttaataagaacacttgttaaggagtgcatcttggtattttgatattattctcttgatagtcataataatagttccctagtgtgctgcatcctctcaagtcttaaatgttttgtatgcagccatacattgagaattgaatggtctcactttgactaggtcagcaagaacatagagaatcattcacctagtgtgaagctgtgacttgtgaacttcatagtgacaccagtaaagacttgtgaactggctgggcatggttgctcacgcctgtaatcccacacttttagaggccaaggcgggcggatcatgaggtcaggagatcaagaccatcctggctaacatggtgaaaccccgtctctactaaaaatatacagaaaaattagctgagcgtggtgatgggcacctgtagtcccagctacttgggaggctgaggcaggagaatggcgtgaacccaggaggcggagctacagtaagccaagatcatgccactgcactccagcctggtgacaaagcgagactttgactcagaaaaaaaaaaaaaaaaaagacttgtgaactccatactgagactaaaaagacttgtgaattccatactgagccaaattacaatagtgagagggtggcatcaatgcctaaagtttcggtctatctctctaaattgagagtctgaccaaaaggggggagttgataaatgaaactcaaatctggcctgaggacgccttcacattcccatatttgagttcttaagggcgaaccgtaacgtagttagtaggtaggcagactgaaaacttaacttaggaggatgcttctttagcaatagctgagtctcagccaatcccactggccatatttcaaccactcacaggcagccaactattcgaatcatgctcagataaggtaaacaccaagctgtaaacaatctggctgtttctgtacctcacttccattttctgtatgtcactttcctttttctgtccacaaatttgctttgacagcacagcatccctggtgtctgtctgtatctgctgtgattctgagggctgcccgatttgcaaattattcatttttcttgctcagttaaactctgtgaaatgtaatttgtctaatggatttcttttaacagcacttataattaaaatggaaagagggtgtaaatatttagaaaacttgcagcctggccatgtgatagacaaggaggaatccaagcagcctgctgagcaactatttgctagagacattagcatatctaaaagggagccaggtgctaatattcaagacagtgggaaaaggcctcagaggcatttcagaaggcctctcctatcacaggcccacaggcctaggaggactgaatggtttcagagaccaggcccagggcaccattgctgtatgtcacctcaggatgctacttcccacatcctagcttctccagctccagctttggctcaaagggcccccggtgcagctcagaccacttctttggagggtacaagccctaagccttgggagcttccatatggttgtttttttttctttttttgagacaatcttgccatgtcacccagtctggaatgtaacggtgcgatcttgactcactgcaacctctgactccagggttcaagcgattctgctgcctcagtatcccaagtatctgggattgcaggcatgcaccatcatgcccagctaattttgtatttttagtagagatggggtttcacagtgttggtcaggctggtctgcaactcctgacctcaggtgatccacgtgtgtcagcctcccagagtactggaattacatgtgtgagccaccatgcccagccttccatatggttttaggtctgcaggcttgcagaacgcaagagtgaaggaggcttgggagcttccacctagatttcagaggatgtatcaaaaagtctgggtgccctgacagaagcctgccacaggggcagaaacccacagagaacctctacaaggacagagccatgggaaaacatagggttggaaccccatacagagtccccactgggacattgcctagtggagctgtgggaatggggccaatgccctccagacagcagaaaggtagagtcaccagcagcttgcaacctcagcgtggaagacccacaggcattcaatcccaacctgtgagagcagccatgtgggctgcacccagcaaagccatagagacagggctgctcaaggccttgaaaggccactccactcaccagtatggagttacggaagatgattttggaagtttcagatttagtgtttgccctgctgggtttcagacatgtgtggggcctcttgcctctttcttttggccaacttctcccttttggaatgggaatgcctacccaatacctgtaacacaattatatcttggaagtatgtaacttgtttttgatataacagcctcataggtggaaggaatttgccttgaggctcagatgaaactatggattctggacttctgagttgatgctggaacaagctgagacattggagaactatcaggaagggatggtttcattttgcaatgtgagatgacatgagatttgggggtaaggggcagaccaatatagtttagatgtttgttctctccaaatcatatgttgaaatatgacccccaatgttagaggtggggcatagtgggaggtgtttcgctcataggggtggattcctcatgaatgggttggtgctttgtccatgataatgaatgagttctggctctattagttcacatgtaagctggttgtttgaaagcacctagcatctctcttgtgtgctgtctcgccatgtgacacatctgctcccccttcagcttccaacatgagtaaaagattcctgaggccctcaccagaagcagatgcctgcactgtgctttttgtacagcctgcaaaaccatgaaccaaatacacctcttttccttataaattacccagtctcaggtattctgttatgatcccctggaagagttatactacttccaggtctagcccatggtaaatcccacactcccctctgaggccaccttcttccctctgcagagaccctggagttagagtggattggttgtgtctctggccccaattcttctcccgaggctgcattccacccttttgctatgtgactttgcagcccttctcactgcagagacaggttcctctccttgagtttggggaagatgcaacacatgcaggggtttgaaaacacatttgtttgtttctgcttttgtttttgctcctctgcaatttccttgaaaccatgcctgaggtagcctgtgggaaaacgaaacagcaccattgacctagtctttcagccaatcccactgcatttgtacaatgcagtctgacaccagaggaactgcccagccaagctcaggcaaaattgctgacttcagactcatgaactaaataaatatttgtttcatttggtggttgttcttatgcaacattatgctggcactagaaaaatgaaacagatgggaatcaaaaagactgaatgaagcagaaacccagaagctaccccacaagcaatcacatgggactcagatgtgaatggacaataagcttttattgcattgaaaggtcattgcagtgaaaggttggggattgcttgctgctacagctgaatggattctattctgaccaatacacacagaaagagatcacagactccctaccttagaagaagggaggtggtagatgaaatgaact

SEQ ID NO: 485 - DNA, 53219 bp, Homo sapiens
gattttcatcagctgggatggagtgctgcttttgccaacagcaatgtctctgccgcccagtggccaccttggctggcttactcagtctccagtctgcccctaaattttggcggcctggagtgcaacatgaccccaggggaggaggggtgcctaagggattcatggtggccatgcaggtcagttcctccccactagcgcccagaccatgggtcctctgggaaagcacctgaagcccccccactctcactggcccaagaaaaatgacaggttttgtctttctgcctctcttccatgcttctcttttatctgattcctctgatctctattctccagtactgtatgtctattctcccattctgccttatcatttgctggtctttaaaaatttatataaggtcctcattagaatttaaaaatgtttctgctgggtgtggtggcacacacctgtaatcccagcactttgggaggcagaggtgggtgaattgcttgagcccaggagttcgagaccagcctgggcaacatggcaaaaccaaaaaatacaaaaattacctgggcatggtggcatgcacatatagtatagtcctagctatgcaggaggctgaggtgggaggatcacttgagcctgggtagtaaaggctgcagtgagctgagatcatgcctctgcattccagcctgggcaataaagtaagaccctgtctaggagaaaaaaaaaaattaaacattttttcttcatgtagattccgtacatttcttattaggtgtatctgtatgtagcctttttgtttgtttttacttttttgaattgctaccttttttttttgagacagtgtcttgctttgttgcccaggctggagtgcagtggtgcgatctttgctcactgcatcctccacctcctgtgttcaagcgattctcgtgcctcagcttttcgagtagctgggattacaggtgtctgccaccacgcccagctaatttttgtatttttagtagagacagggttttgtcatgttggccaggctggtcttgaactcctgacctcaggtgatccgcccacctcagcctcccaaagtgctgggattacaggtgtgagccacagctcccagctgattgcggctttttaaatgggatttttttctttcattttattttccaatcagttgtgtgtatgtagcaagctattgactctcatacatacatttttatagctagccatcttatcgaattatcctattgattttaacagttttgtttttgtttttgttttaactctattctctttggttttccaggtgtagagtcaaaactagttgcaaataattataatattatcttctctgttatgtttatgacttttattctcccatggcaatggtgagtttcagtgctgaacatggacatttcctgtcttcttgggttttccatttggtttcttctgagaattctgcttctctgattttgtttatgatttgggatattgaacctgagttctgacctgggctctcactggttctggggagtgaaggtcaggggctcagaggatccttagaattgggggtccacaaggctggtggactgtttaatcctctcctccacgtccacaactcatatccctgtcccatcgtccctcctccttcctggtgcttcctccagcttgacttgtagtcttgggagcttagcaagttgattttagggaaaggaaaaccaagaaaggaatggttacaaaactctaggattatttcaatggatggattttataattagagaaatacactgtggatgtatttctaagtatatttttgcattaaaaaatacaactcaagcactattaggtgccatgaacagaaatcaaactcaagccagcttacatttggaaaaggcaaattcattgactcctatcaccaagctgcaggaagcctgggttgttgcttaacttactctcatccctgcttcctttgaggactgacttaactctcaggctggccagtaccctaaagttggtaccacggtgtgggcagctctggggctgccatcttaattctaagcacctgaattgcttatctcatttaatccatgacatgaacctatgaggtgggtcttgttatccccattttacagatgaagaaatggagcctcagtgaggacccttcccaagttcacaaagctggtaaagaactttgggatctggagtcaactctgattgaagagcttgggcttttagccctgtgcattctcctgcccctcctcttgagagcagagagaaaagagctcttcccactcactccagttgggctggaatgggctcagattggcctggtcgtttgcctatccctgggccaattactgatgtcaaagggatcagtctctaggattagcccagccagggctatagagaaccaaatggaagtagagctctttcccaaatgaagcgggggtgttgttctgggaaggcgaaataataaatggcccctacaactcccaagcccaaaccctccactctaggtagaccagctatttcaatgctctgggaacaagtcaggcacattcctgcctccccatctttgtgcctgtcattccttctctccgaaatgcccttttctcctacatcctgggtcgaatgtcccttctttttgtgtgtcatacctttctttaggtagcatcaagcttcctcctttctcctgagttttggggagtagctctacagatttttcccactatttgattgatgaaaaggtagttttattttccaaaggtaaaaaaggaacagcttcctctactgacttttctatgatcttgctctccccttcgaactttccagctgatggaactttgctgggaaaaaaaagcagctcaaggtgcctgtgccaagatattagcatatactgccccaggcaaagacaccgctggcatgctccatctgtttttgccaagttctgttatgtaagtgacagctgagggtatcttttaagaagcgtagtgtttgtgaatgatgtgtcttaatagaggaacaatgagacacactggcatgcacagcgtgctttgtgggagcaggttttttgctggagggtaatttggaggggaaaagatgttcaggaggaatagcagttaaggtggggtggtgggtaatagtgacaagagggttcttttcatttgtgaagggctgcctgtgggctgagcctcctctgggcatctctcttggggcagggcaaacacactcttgagaatcaactgtgaggagtttgctggagtccccagcacctgctcttctcccacccaagttagagaccagtccatgtttagccccctggggactctagatattatctctaagcttggaagcaaggaattcacttggccagtgtggtggttgtaaaacatagctcctagattctttggcacttttcctatctgggatggagtctatgacctttcctcttgattctgctttggccaatagagtatggtggaagggctaagactgaaaaggccatgtggcttccccttggtgctctgatagtgtttgctttctagagaccccttctcagaaagccttctctctaactcaactgccatgttgtgaaaagccgaatccacgtggagaggccatgtataggtgttctggctagtccttaggccatcccagcccaggcactagacctgtgagtgcagaagccaccttggaagccccagacatcgtggagaagagaagaaccatccccactgtacctgaatccccacaggaattaggaacaaaataaaatggtggttgttttctgtcacaaagtcttggggatacaacaaagatgacggaaacagtcagagtctcttgatgtcagctataaccgagggtcccagaacccccttcagctttctagtgccagagagtcaggagttgtgtgatgttctgggtagagtggggttctttgcagggaactgggatcccgggacatctgatattatttcgtaagggcttctaatgcatataaaaacgatgccatcttgtccaggagcgttttcccagcttggagtctgcttcgcttcccatgacatttgggcactctgccgtaccctatcagccttgatggaaaattccaatggacctttttctctacagatgtatttattctctaagaagcaagttccagcaccccatgcacagggtttgccaaccatctggaaggtttgatctcaatacctttcttcctcctgccatattgtttatctcctggtcactgagtgtgatactgagtttacggaagcttgagggatttctgccagccagggaatcaataagtagtggttgagtgattatgctttctaaaggcttgtggaggaaaggaagaactatatgactcagtccattctctcaagagccacaaacatgtaaagtaaaatagtacaaagattataatatttccagcatttatatagcactcttatctaagagagtgggtagcaggtactcttcattttctgtgtgtgtctgtctgttggagtttagggacctcttttttttttttgagacagagtctcactttgtcgcccaggctggagtgcagtggtgtgatcttggctttctgcaacctctgcctcctgggttcaagcaattctctgcctcagcttcctgagtagctgggattacaggcgcctgctcccatgcccggctatttttttaatatttttagtagagacggggtttcaccatcttggccaggctggtattgaactcctgaccttgtgatccgcctgccttggcctcccaaagtgctgggattacaggcgtgagccaccgagcctggccagggacctctttttataatacataagattataaaggaagctgatcatattgtaatatggctgtccaaacactaaaaaaccaaacaaaatcaaatttgtgaatgtagtaacagtttatcttttgtattagcccattaaataataaaacctagcaatagttttataatcaccctaatattgaagtagttatgagtataaactatatattttagacactgcaacaactgtagtgtgacatgaaatatctgtggttctgttggtgacaaagtcacaggtatgttaatacctccatgtgagtgcctacattctaattgagagaaatgctaaattttaattagaggttaatgcaggcagaaaggggtccatggtttgtaataaatttaaaaacaatgaaaaaattgaagttggtcttgccgtcttttattttttatttttttgagacagagtctcactttgtcacctaggctggagtgcaatggtgcaatctcggctcgctgcaacctcagcctctcaggcttaagtgaccttcccacctcagccttccgagtagctggaactacaggcacatgcgaccatgcctagctaatttttgtaatttttgtagagacagggtttcaccatgttgcccaggctggtttcaaactcctgggctcaagtgatccttctgcttagcctttgaaagtgctgggattacaggtgtgatccaccacatctggccagtcttgattttattatcactatgtaccattggctttcaagattgtcagtggccaggcgcaggggcttatgcctgtaattccagcactttgggagatggaggctggcggatcacctgaggttgggagttcgagaccagcctgaccatcatggagaaaccccgtctgcactaaaaatacaaaattagctgggtgtggtggcgcatgcctgtaatcccagctacttaggaggctgagacaggagaatcacttgaacccaggaggcggagattcaacaagatcgggcaacaagagtgaaactccacaaaaaaaaaaaaaaaaaaaaaaaacaacaaaaaagattgtcagtgacaaaatacatccctgcagggggccaaaggttcccattgcttgtcttcctcacccccatatgccactgaatagagatgtaattctggtatcgttgtttccccatctaagttcaaagacacctaaatcctatccatggactccaggttacaaactcttgttgtatggtgtgtcatggtatggggggtgggctttagaatcagacaggtctgagtttgagccagctgtgttattcattagttatatgaccttgagaaaattgcttaacctctctgagaatcggtttccttctctggataacagggtataataatggtgcccttcccatcattgttgggaggattccctgagattctaaagtgaatgacatggtgagcactgtgttcggcccttggagagggctccatcaatggtggtggagctgaccgtcattgtaatggttgatcttcccattggcgctgtgcaaaggtactattgccttggtttatcagctgagaaaaccagtcttcaagtctgccgaggtgttctgatggggcaggagatgcctgctgtcctgctgtcacccaactgccaaagagaacctgatttgctctttctctccaccatcctgccctcctgccatggtgggcaccaagttgcagactccaggaccagctaccaggagccctgctcgggccagaactgacctaggataggaagggtttccctggatcagtgggagcatgtaggtaggttctactgcccagcgggaaggctatgctggcattccaaagccctgccctaaccctcccctcatatgaagttccttgactttggagatcactccctcttagaacccttaaagccctcctggctgtgccactcatctggcacttgatgtacatgcggatgtggtcatttttcttacgccagctgctctcctcagttagatcataaatggattgagggcagggaatggcaagataattcctgtggatggaaggaattctgtcttcctccctctctagctgaaagccttggacataataagtgcttagtgaatgcttattgaatgaataaagaaaatcaatggtgaaaggatgaatcacagaatcatggctcctgggtgcacttcttagagctggttttgtactttgctgcccgggtcccgggcctgtctgtgttgtcatatatcactgagcctcacaggatgtttgcaaacaccttgggaagtgggcagggcagctagtgaggctcagagccagaatgccactccagaggcctgactccagggaaggtgtcttttccactttacctggatgcctttgtcccttagggctgctataacaaaataccatagacttggtagcttataaacaacaggaattgatttctcactgttctgaaggctgggaagtccaagaacaaggcagatttgtatctggtgaggactcaccttctggatcatagatggtgccttctcgctgtgtcctcacatggtacaaggggtggaggagctctctggagcctctttcatgagggtactagttccattcaagaaggctctgccctcatgacctaatcaccttccaaaggccccaccttgtaaaaccatcacactggggattaggtttcaacacaggaattttgagagacacaaggattcagaccacagcaccagaatgcggctgagagcttaaagtctcggcaagcactggccctgtacccagaggttaagatttaattgtctgagtggggtccctaaaacttgccaggtggttgtatcccaccacccctgactgagaaccactgccctactccaacatggaggtggaccaggcagcatgggggctttcatgggcatgagtcccagctctcctacccactatctgtgtgatcctgtaagtgacttgacctctttgagcctcagtttcctcatctgtaaaatggggacaatgatagcgcccagcctctaggtaggttgaggaaattgaatgagacaatgtgtgaactgctcttaacatgtcataagtactcaacaaatggtaactgccattattattattattattattattattattattattattattctgttgacatgcatgagtgaaggtggaggagagcctctggccataaagctgtccctgtcttgtgtttcatgtaggtctggacccaacatcccagcacacatgagcaccttgtgcccaggagagggctgcttggctgtctccagcccctgtacccagcaggccatggaagtttgaaactgtaacaaatcatttattatccaggaaggagggatgtaaagggagagacttctgcatttaaagcatttttactttattaagagtctttctgatgtaaaatatgctcacacagtcactttccacggcaactacattaccattattttcagcactctgaggagaaaatgagattaggtgtggggaagcggctggagtagggtgagcattcgagggctggatttaaatccaattctgcaggttgagtctgtgttaatgcaatattataggatttggaggcaagggcctctgtggcttaatccaaggttctccaacatctgggtcattggcaatgtcactgctgcttttattctaactatatcgagagaatagtcagggtgagagctaattctgaattcccacaattggttgcctttaaggcaccaaataggcactcctgccagcagagctttcttgatcacaagagacctgaaatagaaatggtttaaccctttctggatgattagacaaggcaggggagtccacatccccagtatctttccactcctttcagatgaatttcaaacaggagagcttagagatcaaagaaggatgcacatttaattaccccactgcagccacaatctgctcaaactgccaggaggccccatgaacatgagcaagtagcagcgccacagtcaccaggcatagatttatcaaagtctcatgtgctgggctctctgaagggtgtagtgattgagaactcagccccttcccagagggagctcagattttagtaagcaaaaaactgtaataaaagatacaactgtgaccagggccttgagcaagcagggcagtgactattcttaggctgacctaatagccgttccctatctccttcttattttccttgtctactctaggggacttaaatcctcatttcctgccctctgttgcaactagtcagtgatgatgtggtttggggtcatgaattttaagtggaagtctgctagtgggttccaggaaaacttctgttctccggattaaaaaggaggaagcaactggtcctcctacttctcctttattcttgcctggaaagcaaatatgatgcctggatgtgtggcagccatcttgcaaccgtgaggctgagaaacgggttcaccaataaccagtcacaagagaggacccccagtgcttggaggacggcaaagactatcactatgccaaccaccatgactaggattctgaacacttctgcccattgcattgcgggctgtagttttaccaattgcctgagtcccgtgagatagaacagactcacatgcaacaagttacaggaaatggatttattactcagcaatagtcagcaagggacaaagaagactgggagccactgtgagccagtcccctaaggagtgtgaatgtgttcaagaaagctgcccagggtggatggagtttccactgcttgtgccctactttcatggcagctgagggcccctaaaagatagctcatttccagttaaaagcctcaggggctccatgactcaccgagcaaagctcggaaggacatcctacttccagggaagagaggaacaaagtgtgggctgtcctgaacagttccctctaactcaagatcttacattccccaggagaaacaggaaaagagccaagctctttcaggcagtcctatctcaggatgttgcattccagcacattctaaagttatcctgagaactacatgcagaaaggaaggggctaggaactgggtcttccaagtccatctggggactgtaccagataaaggccactgtggagatgctgtccctgatattgtcaggcccccaaagcaaagttggcagctgccttccatgagacgacctcttatgtgaggaaaagaaatccctatttatctaagcttctgtagttttgtgtgccctgaggctcaatgtaatcctgatacagacacggaaaagtacagattaagtgtcagggggctgtccaggtgggacaggggagttggcacaggagaggtaaggaaagacttcatgggggaggtcgtggcatttgagtggagacttaaaagacttcagggttaaatatgtagagatgggaggagagtaagccatggcgtgggcagaggctgatgtgggaagcaagaaccgctggggaaaagaggtgagcaggttgcagaaatgaaacccaagcctgagtgaacaacaaatactcgtgtgattgggaagcccaaggctggactcacttcagacatgtttgtatccaagaacatacattttatcgttgggagtttgttgccttttcagctcttctttctgcctttgtccttgaagagctgcctttgagcagcagataggatgaccagtagtcgtgtcagacccacattcttccagcttaggaacgtgtgtggaacgagaaggttggacttcttttttgtttgtttttaatgcatcaaacgcattcacatttattttcgttttttaaagcaaataataaagacccagtttactggctttacttttttaaacctaagcttaacatgacatacataaacaattgtcaaaacgaagtcatcagcattcatgcacaattgaaaaacatccttaatgtgtattaaatcagaaagtattaccattaaagcatgaatatctttcactactaaataccgaataaaatcgaaatgatttctgtaagagattcatcctggcaatgttaatgtcatagcaggctgatactacttgactcacatttcagacacaacggaaaagcaggtccatgctggtatcagtgtatgatcttgtcctaccactaaagagtcaaggctcaccttggagtaagtttaataaaaaagcaaagtgcaaacagagatttacaacaattttaaagaccaaaaaaaaatggtctctgttatggtttggctctgtgtccccaccgaaatctcatcttttagctcccataattcccacatgttgtgggagggacctgctgggagatgattgaatcatgagggcaggtctttcctgtgctgttcttgtgatagtgaatggaactcatgagatctgatggttttaaaaacaggggtctccctgcacaagctctctctctctttgcctaccttccatgtaagatgtgacttgctcctccttgacttccaccatgattgtgaggcttcctcagccacatggaactgtaagtccaattaaacctcttttttttctttcttttgtaaattgcccagtctcaggtaagtctttatcagtagcatgaaaacggactaatacagtctcaaataaactcaaaagtctatgacaaataggggctctgatgagctgtttttaaatactttagattaggtgcaactatactgaaaggcaagtttgtttgaaatcgtcaaaaaattgttcctgttaatcttcaaatggtgcttgttgtagttgaacatttctgttaaatgtgtgcattgaattgcttgttatccaagctcagctgctgcctgcccctcaccatgtattgttaaagactttatttaactggccatcatttaactggctgtcatcttcaacttctactctttcttgacaattctctttgttgtggtttttctgctgttaaccattttagtagaagttgatatcaatttgaagttgcccatcccactaccaccaaatgacatggaagagaatgaagtgaggcccctgtgacctagtgacctgattgaaataaatcctgtatcaaaagaagaaaatccacttccaaaagatggaaatccagtgaaggcagagaaaaatgaccacatccctcggcctctgcttcctcggggatcccctccaattcccaaaaaagtcctcaaatgaatcttcaaaggagttgaatgaaaatgggtcccttccaccaaatagttccctgaagacatcacctgggttatggaatgtgaagccaagctcacacggactgacaaaatgacttctatctcctacctccctcatttaatacttcttggctgtaattgtcacttttttttttttgctgtggatgtctttttttttaaaaaaagcatctggtagcacctcatatggctcagtcacttgtttgaattttctctctgcttctttcctctcagggtattttttttttctgggtgccaattcagggccagtttccaatatgcctttttaatgtcctcaggtgaggcatgtctctgcatgcctggaacttcttggtaatccaccctgttttagcagattgctggaaagaggaggcagggagacagcccaggtctcctctgggctcccgcacactgtgctggtggtggcggtggcagccccttgtgctctcctttctctttcgcctcttatccatgtatctggccttgacaagatcaccattggcctgggttggctgattcccgatcaattcaccacagacagagagatctggggacctctgaatcacaagtgtgggcagggtctccacctgaaacgtcaccaagtgtttgatagcctcaaggggccacaaagagtgagggtgagttccccaaagggtcaggagaagacagtgggtaaagcatcctgggtagactaaaccacagtcttctataagcaggtaatttaggtgcagctgagacagacaggtagtcagggctcgccggagcggctcggatccacctacgcactgggaggagggtggagccacggaagctcgcactatttgcagtggggaggagcttggcctctcctgttctgggttggtaccctggggattcaatctgtgaggcaggaagccagctagtaggactttcactttgttgggagttcctatttcctttttttcctctttgcccaataaattcaatttttctcacccttcaaagtgcctgtgagcctaatctctcctggctatgtgacaaggaccccgtttttagctgaactaaggagaaagtcctacaacataactagatgaggttacggcaggcactaaatctgccccgagtgcttgactcagcctcacttgatccgctgcaacagcctcccctctggactgagatggtgagcatcagccaaggcaggactcggcacacggtgcagtcagcagcctctccagggacatgccaaggtttccaggaggccagtctttgctggaaatttctcagtgaccacttttccccctttctttctttcttttctttctttctttttttttttttttttttgaggtggagtctcactctgttgcccaggctggaatgcagtggcgtgatctcggctcactgcaacctccacctccctggttcgagcaattcccctgcctcagcctccggagtagctgggattacaggcgcacgccaccacgcacagctaatttttttttttttttttttgtatttttagtagagacagggttttgccacgttggccagactggtctcaaactcctgacctcaggctaactgcctgcctcggcctcccaaagtgctgggattacaggcgtgagccaccgtgcctggccttccccctttctttacctgccttcctgttggatggatacatggctattttcttactgttagagacacattctctctctctctctctctctctctctctctctctctgtccatctctcctctccctttgtctctctcattaaagcaaataacatagcaggaggaatgggaaaagtagcaaatcccaggctagtctcatcatttctgggctgaaatggaaccacttgtggtgtgtggaatcgtggcatccggcatgccacattccctgctccctgttgtcctgccctgtctgtctgctacaatcacctggagcccctccctcaaccaagacatcaacaacagaaacaaaactgcttcctctgaccagcaggaaatttccaggtgaacacactctggcttaagtaattaggcaaagaatgtggctttgtgcagttgtggagagactcaacttgctcttagagtctttgtttctgttcagtccctggagtgcccctgctttcactgctgtcctttgccactagaccgggcagaaatccgcctttttcctgcattccttccactgttgttgattcagctcattttacataccaaggcacctttcctgattccattctttggccaaagactccctcagaactttaagaactttaagccaccaaatgcagcaggcacttttttttttttttttgagatggagtctcgctctgttgtcctggctcactgcaacctccacctcctgggttcaagtaattcttctgcctcagcctcccaagtagctggggctataggcgagcgccaccacacccggctaatttttgtatttttagtagagatagggtttcaccatattggccaggctggtctcgaactcctgacctcgtgatccgcctgccttggcctcccaaagtgctgggattacaggcgtgagccacggcgcctggccagcaggcacctcttatgcttgctttgaaaatatacttatgaggttagtgcccatcttcctgtcttatgattcgaatcctttccttctttcttccctaattcctgttctttttctctcatgacccctggctacccattagcctttggaaaaattctattatgtttgcctgtttgtttttttctttttaatgtatatgttaccagaaaggggtcccaatccagaccccaagagaaggatcttggatctcacacaacaaagaatttcaggcgaatccacagagtaaagtgaaagcaagtttgtaagaaagtaaaagaataaaagaatggctactccatagacaaagcagacccgagggctgctggctggctatttttatggttacttcttgatcatatgctaaacaaggggtggattattcatgagttttctgggaaaggcggggggtgggaggatttcctagaactaaggattcctttccttttagaccatatagggtaacttccagagtttgccatggcatttataagctgtcatggtgctggtgggagtgtcttttagcatgcttatgtataagtagtgtacaatgagcagtgatgatgaccagaggccacttttgtcaccatcttgattttggcaggttttgtccagcttctttactgcatcctgttttatcagtagggtttttgtgacctgtatcttgtgataatggtcctgccaacctcctgtctttttttttttttttttttgagacggagtcttgcactgttgtccagactactggagtgcagtggcgcaatctcggctcactgcaagctccgcctcctgggttcatgccattctcttgcctcagcctcccgagtagctgggactacaggcgcccgccaccatgcccagctaattttttgtacttttagtagagacgaggtttcaccgtgttagccaggatggtctcgatcttctgacctcgtgatccgcccacctcggctttccaaagtgctggggttacaggtgtgagccaccgcgcccggcgtaacctcctatctcatcctgtgactaagattacctaacctcttgggaatgcagcccagcaggtctcagcctcatttcacccagccactgttcaaaatggagtcactctggttcgaatgcctctgatgtgtacaaatctattgtgctcattgaagcttgcctttttatacacttcttggctcagagaaatactttttttggaggcagcaaatgtagcagaaagaacaggcaattctgaagcaagaagagtgatatggttaggctttgtgtccccacctaaatctcatcttgaattgcaaaccccgtcatcctcacaggtcaagagagagaccaggtggaggtaattaaaccacggagtggtttcccccatgctgttctcgtgacagggagtgagttctcacgagatctgatggtttcataaggggctcttcccccttcattcggcccttcttcctcccaccttgtgaagaaggtgccttgcttccccctcaccttctgccgtgattgtaaatttccagaggcctccccagccatgctgcacggtgagtcaattaaacctccttcctttataaattactcattctcgggaagttctttatagcagtatgaaaacagactaatacaaagagttttctgtgttaactcccggcaccgtcactcactgttgtgaccttgggcaagttgcttaagctctctgtgtctgtttcttaatctgtacagtgggtatgatattaatacctatctcataggtattttttttttttggtcttaaatgattcatgggaaaagtatgatgtatgctgagaagcagcacaaagacatttcatgtgtgcggacctcatgtacgtggaccatgtggaaggcagctttagtcctgactgcagaaaagcgatgttcacatgcgcgttgggaactggcctgcgcacccagattcccagatccaggaaagcccttcatttccagtgctttccatcctcgctccagcggcagatgttagaagctgactgagatgttttctggattaattgcccccaaacattcagggttttatgttttagaatgtctgaacaggttggaatttgaatctcccttctgccactccttgtcttattttggaaatgaacttaaagtcacatttttgagattccgactatgtgacgcattgagctatttggagcgttggtttgcggctgtttctaagcctggactcttgacacggctttgcctgcagctctggactctccctcaggctccagggctccctgtgcccttgcggtgctccggcctcttggcttctgagttagattgggcatctctcagattccttggctactgagtctgtacatcccatgactcccgtcctccctctccttccacaagccggtcggtgaccacgcagccttctaggtggtccaaactttctggagctttccactgggaagatcctaatagccctaatccctcctttaacatcaagcagagctgccctcaatcttttaatagaagcaggtgaactccgactagattttttgtgcactagtgaggcttgctgtgtttactggtatataggatacattccccgcttttcccaaatgatggattatatatgcaaaataaaattttatactttatatatgaataatgtatatgttacaacataagatatattacgtattacataatactatacacataacatatatcaaatatatggcattgtacgatatctaatcgtttattatatacacaagttttcttgtcagtcttacgctttggtatcaggcacagctggaaggctgagaaagaggtaaaataatggggcatgctaccccctagtggcagaagatggcaacatacattttgcaaatgtgagcgcttttcatccccttatcaaaaaacaaaacaaaaaccagagaccacacagatgaatatggaatttgagtaactcccctatgttatgaatttaagtattttttcactgcaactcatattcctaaataccaagatatttctttttagctctgtgattttattcttgtttttagggatactagactgtgtatcaaaaccgtactattttttaatggagtcacaatcctgtgtactatatttataggaataaaatatttcccttacagcttagtctttatttttccaaaaaactttctgaaaaattgagatgtatctgatatccccgcgcatttcacatgttggcaaacatggcattttactgcctctggtgcacaaaaagcccttgagcgctcacctaatgcttctgtgaagtcaagggttccgagcacgctgactccatgttgctagggagcctctctaggaggccagcaggccgctgggcggccccgactgggatctgctgtggtatgtggccctctttgctagtgcaggagcttcctccggtcactttacctgcattcctttgagcctggggcccaggcgggggaccctagcaagaggcttacttacgtggtcccctgataccaggcatgggaatggtagcacttgctgattgtgtgggtctctggccacaatggaaatatttaacacacaacaccttagagtggaggtgggcagatttttctctgaaaaggaccagaaagtaaatatttgattaaattaattaatcaatttatttagagacagagtctggctttgttgcccaggctggagtgcagtggtgcaatcttggctcactgcaacctccacctcccaagcaattctgctgcctcaacctcccaagtagttgggactacaggcgtgcgccagcactcctggccaatttttgatttttagtagagatgggatttctccatgttggccaggctggtctcgaactcctgacctcaggtgatccgcccaccagggcctcccaaagtgctgggattagaggcgtgagtcaccatgccctgtttagaaagtaaatattttagacttgtggctcaatacagtctctgtcgcagctcctcagttctgttgtcttggtgcaaaagcgaaaggatgtgactgtgttccaataaaatttcatgaacatgaatataattttcatgtgtcttgaaatagtactctccttttgagttttttcaaccgctttgaaatggaaaatcattcttaacttgctgacagtataaaaacagacaacaggctggaagtggcccgagggccatcgtttgctgaccctcgtctgagtatcccgttattcctttctagctatggcagtcttttctaacagtcacaaacagctgaattcacgactctattctatccagtttcctggataaaacatagttcataaccggttaaaatttctggtcaattccaaacaggcgcatatttatttagatgtttagaactgctctgtggagcccagccctttatttcctccaaagaatttgttgatctactgaaaattttctttcaaaaacaaccttatggatgtgttttgtaaaagtctcatttagaacctttggggcctcactcagtcacccctgaatcctcatcttttcatgtacacacctctgtccgttttctcctcttttcttcctaattagctgcctgtataattaaacctttcctcatttagaggttctgagccctcactgatacactaatcaccctgtggccctcctgttgcctcgtctatttccttttgagatggagggcccagcactgaacggcagtcaaggtcgggccgcccgcatttgtattacacactagttcgccattaccatggtgttcgctccttaatacagactaatagctcattctccttcatgacctccagtgagcactgtgcagccatattcagtgctggctttgtgataatttcaagatttttttctttaggaagttataactaattcagggcccatcaacgatcataaatagtttaaattgctctttcgagtgtgaactgcctcccatgggccatttaatttactgaatgtcccctggctgtgcttgttctgtgaccagcccctgtccctgcccttattaactctgtttctgtatctcactttggtccagtcgggagaggtggcacttatatttgggaatgagcttgtgcttgctattgacctacctagcaatgcattaaagatggatttgatctgatttaaagttttataagcccaagggggttgcctctggaggatttttggaggccaaactgatcctggaattgtgcttataggtggtttgcatttgctcagagaaaatctaggaattttactttacctgaaacttttctggttttgcggttttactgggttttaataatttgccacctctggaaaacttcagagacaaggtgttgcctagttggctagactaagtattttagctgtctccaattggtaactgtttaagaggtttaaagacacaaattaagttggtaaaatttgaatatgtgaatccgggtgaaggatatatggtggtttggtgacactatttttgcagcttttctgttggtttgaagttcgttgaaaatgaaaaggtccattaattaagaaggtgggtcaacgttctgtcacagcagcacctgccatttgcacactgctggcctggcccgccttcccccatgggaactttggtgtgtacttggatttacgtcagccctgtcccagtgaatgctcctgctcttttggtccctgtccccacttgcctgccccatctcagtcaagaagtaatcaaatatgagctgagcaccagtatgacaggggagtggggagtaagcagacattgtccctatcctcagtacgctaccatctaacagagaagacagaaactaagcagagaagcacaaaaggctgtaaaggagaagtgcaggttgtggaagggtctaacccactggggaagcagggaacccttcttgggagaagtggtgtattagtctgttctcacactgctaataaagataaacccgagactggctaatttttttttttttttttttttttgagatggaattttgctcttgttgcccaggctggagtacagtggcgtgatctcagctcacggcaacctccgcctcctgggttcaagcgattctcctgcctcagcctcccgagtagctgggattacaggcatatgccaccacgcctggctaattttgtatttttagtagagacagggtttttccaggttggtcaggctggtcttgaactcccgacctcaggtgatctgccctccttggcatcccaaagtgctgggattacaggagtgagcctgtgagactcacgcctggtgagactggctaatttataaagaaaaataggtttaatgaactcacagttccatgtgactggtgggggagacctcacaatcgtggtggaatgcaaaccaggagcaaagtcacatcttacatggtggcaggcaagagagagagtctgtgcaggggaactcccctttataaaaccatcagatctcatgagacttattcactatatgagaacaacatgagaaagacccgcccccatgattcaattacctccaacccggtccctttcatgacacgtgggaattatgggaactacaatttgagatttgagtgaggacacagccaaatcatatcaagtggtgtttgagcccagaactgtaggatggtggggtttagcttggcaaagagagggtgcaggtgtgctgtaggtcaagagactagcatgtgtgtgggattccggggcatgtcagaggtgttgacagaagcccagcctggctggagcagagagtgcaggggcctggacagatgagttagaataggcaggcagggtcttgcagactgctttgatagcttatttttctttattctgagagccaggggaaggagtaggcagtgatgttataatgagatttgcatttttgaaaataagccctcttgctgcaatgtagaaaatgaattggaaaaagtggcagtggtgacaggaagagaagcaaggagtctattgcagcatctggcaagcagtgatgctctcctggtcctgatggtggctgggccaatagagaaaattgggtagatttcagagttgtgtaggaggtggactcacagacttggtgattaattgaactatctattatggtatttttttattgaaaaatttctgtttttccttttgctttgtagatctggttgaaaaatacttttcccaaaaagcatttgcaaatatacccatttacatggcactgactaattgtcttgcttgtgtatgcccaagatgaatattcctcatgcaaagatgatggtttatctcattcaataagattgtgctaattagaaattaggacctatccatctcacatgttctggaaatttaagctgtaggagatgaaaattaatgtagtttttaagcaatctattgaatttattaaattgcaattagatgatagagtttgtattggaagatatgagttttgacaggaaagaggccctgcatgatacaatcacaatactgacaaataaatgccattgtacttttccatgacaaggatgatttacaattatagtagtacatggttctctttgatttatggcatcctgttagccatggaattacttagcaaaatcagtttgacttgatataagattttttccttgcctagaaaaaagtttagcctgaggaaaagttgacattaatttaggaatagtggagttatcattgagttatcaaaataaatccgaggacataaatcaattctactgcatggagaatgctaaatcgataagtccagaaagactttattgattctacggccatcactcaagccttcttcattagattcctcagccatatgtttaattgaaatgataaggtagataacttctggtaaatctacacatcctgactttgatatggggttgttcaaggtaataaaaatgatttggccaggctggctctctcctttagagtcaggagggtacacatgggaagacttcacatcttctttctgtctcctataacttccactccaggcagatgctagcttaacagtcttaagccactccttctaaattcaatttaaaaactgtatgaaaaaactgatcataatattaagagaacatttaaaaaattactcatagttaataccaccctgaacctattggcaacttctgtgctgaactgtattatctatttctatgtcttgtctctctcacttaaatgattgtgagcagttgagggcaagaggcatttagctcagtatcccttcaatcttgtttcattgcataagtatctttatatagctgcagtcagaactgtatcagttagctgttgctgcaaaaaaaaaaaaaccctcaaatttagtggcttataacaagaaacattttatttgttcatgattcttggagtctggtaggtggttcttctgttctggccagctaagctggtactggatagtctaggatggcctcactcacatgtgtggcagctgatgtgatgacagctgggatgatgaccacctgcctcccattatccaacgggccagtcacatgacagcagaagtgttcccatcagcaagaagggaagtaattctcaagaacttgtgcaagtacttatcaagtctttgcttgtgtcacatttgctaatattccactggccaaagccagttacatgccaagcccgtatttgaggattggataaacggattttgccacttgatgagagaagttgcaaaacattgtggccatttttcccgatatactacagaaatgtaaataaatttgtattcttctgcttttaaaaaaacaactataggtgcttcctctttttccattttttaaagcgaatatattatatatttacaacttactagaggctttaaatataatctgcagatgactctaaaatgtaagtaaaacgattattcccatgttaccattaaggaagctcactgaaggtcacacagctagtaagtggggaagcagagattttaaccttgatctctctggctctacttactcttagcagacttttcatcatgatgcttctttccctcttgttgggtgttcagatgttcatattctttgaaaatgtaggaaatatcaggagaatttccccaagttgtgtgcaactagctctctacttcaacgcttttctgacccaagggtgattggaccttacaggagaaccatgtcaactttcaagtgcaccaaataagatacctctgactttaggtaattttgatgtttgcatttcccctaagccatgggggcaaaggagtggtagcaagatttcaccaaacactaaattaaggatctgggtaccaacccatgtgactgctcaccgtctcctccctcttctcaccaggcatattattgcattcaaacctggtccagcaatctttcttttcctgcctcctcttcctagatcaagtatcttccagatgattatcgtgaaattattcaggtatccttcagccttcccctggccagtcatcttcctgtgatttatcagctgacggttggttcctggtggaaccaagctgatcagacttcaggctcaggatgtgctttggagaaggctgtgctaggtttggtaaccttacttgtcaaatgggtgatattcagaacaaaacaaaataggtataattagttggactggaaagatcatacatgaagattaacagtgacatctaggaggagctgtcaaagcttggccaggagcttggccaggagctcagatgggcttctccacatcctaaccaccacttcaagaacttaggctcaaaattaggcaacttccctaaaatctaaaacccaggtatgtgaatgcctcaaatgctcagcctctcaaaaattcccagccaacacaggtgtgttttgggcattttcctgtggtgtcctggagtggctcataccagctcatgagagctgattgtcaaattttcaggaaattttcaagccaattgttaaacacagccattcttaaaaattaaattgtgtaaatttacaattaagtaaattacatgaaaaaggcaataaattctcgaaactcattacttcctatttattctactacctttttactgttctctatgattgtgaggttatttctacccattttttcagtatggtggaaacagtatatcacggtgtgctattgcacatttcttcccaattctgtagtccatgacatcaaaatggtagcttggaatcaaccctggtgggaatatttgcaccttggaaatctgcaaatggtacaaatcagggcttgatttattgtctcgttgattgcctagacttaagaaagtgatggagaagatgtgaatattgcatattaaacttaaacgtgtgtcatgtccataactattacattgtgaatagtaaaaaaaggcttaggaaattctcccggtatttgaaactatcatctgatacagcaagcaatcactcatgtcattgaagagcaagtgaaaatactgacatacatctttattaactcactttcttttttcttgttaatgtaaaggaaaatatcaaccaacattcatgttgtaaccacactcatttatctattccaaccctagattgagtacagatagaagaattttgcaaaaatcaacaaagccttgtgtgaggatctattggctatatggagtttatcataaagagtataatttgttattatctgtaaattgggtactatagatcctttatattggtaagatttgtatcaaacatctacatgcagtatatctatatatgcattcatttttccccagagagcaattattaaatatttaccaatgctctttctgaagatgttgaagtgtgaggatgtggtgggtccttctatgtgaaattcagggtttccctgggtcttctggtaggaaatgtgatcaagtgtgttgaccacacaggagtgaaaaatctgtagtcatctctgtgaatgagatcaagcgacagcgaaactttctgctggtgtgggtaacgtggtgatggccatggtcagtaaggcgagccagagctcagaaggaaggtgcatccagcagtggtcatgtgacaacagaagtcatgccagagaaaagatggcttgtttctttattttgaagataatgccagggttgtagtaagtaataaacgtgtgatgaaaagttctgtcatcacagggccagttgcaaaggagtatgcagccatgtggcccaggctgacgtccaatgctggcagcactgcctgaatctttagcgtatttgtaaaaaattaaaaaaaaaaacattaaactctgcccccgcctcccaaaacacccaccaaaaacgatttacccccacactgttggcatattcccactactctcttactggtcacatagaagttggtggattttcctcctcgatctgcgtacttgagaataccatttttccttttatccttggctcccctcagtcacagagggccctataaatgagcacattccgccagctggggatgtccaaagtaaaaaaaaaaaaaaagacttccctgcaatctgaggctttcataggaagaactgaaacctgagcaggtagaggacagcattagcagttcctgggtctcattttaggtctcctgtaagtgaatgtcttgttcatcactaagggcatttgagaatgtttgcatttacatttaccaaagtaacagggacaacaaacatttatctgctttatcatttacaaagcacatctacatttcttagcttattttgtttacttctaaagatttctgtttctagcatttcacacgcagctggagagggggctagttaccatagacactggctcactctccagggtgtagcggcctttcggacatggtattaaaggagtttacttgcccttttctactctctttattatactcaatctgcagtgaattcagggcaggaaacaaaaccccggaaaggggttattaatggttccaatagagagtaatcccacttgccaaaagtaagtaggatgtggttacctttgattttgtttctctccccaggggtcatgggtgtggaaggagagccgtagtacatcaagggcagaaaccggttgcttcaagtgttatggagcgagtttcttagcatttcctaaatactgtacctgccgtagctttcttcatgtggtaaattaaaaaacacattgatattacaacaaaggaaaataccacccgaccgggttattttgttttgttgttgtgatccacatcatagcatgtaatgtttgccttggaaaagtcttcatagagtaaggaatgaatgaagacaaaagtccgtggtgactcattggtaatagttcaaacctgttaaaaacaactgggagaggtctttaccgtacacagggctttgggagtttgcctattttccagttaacgtgattgatttttcagagctatgtgggatcccctcggacccacaaatggtcatttgcgactaaaagaactgatttgatggcctccaatggtcaaacgaaaccagattgttatcaaatcttaactctatgctgcatgagcttggattgtctacagtggcatccttggtgcactttagaatgaaaaaaattcaatttcaaaagtaaacacagagaacaaaaatagttcagaggacagcctacacagataacaaagccagcaaatacaaccgaaggatgccgcactgaagcggtattttatatagccaaggattgccaaatatgttttttcaccgagatctgcttttttttctctttagttattgattagctttgcgaaggagagaatattgacatgtgcagaagagcgtaacacgttgaaatagttttagatagagtatctgtggcaggtcttcgtgtttagatttaagtgggaaccactgtgggttctgaaatagcttctataaccagtttcatcacagacctaatcatccaagacatcattccctgtaatttgactgaaaagcagtgagacagcaaaagcttcaattcttgaaaaggatttagcggccagccatcttatggttattaaagacgttcttgtgccgtctcctcccctctctctttactccagccatgactaaataaatccagaggcttgaatcaaacatggaaaaggggagcgacaagcaaaggaccagaacagactcctggggaaacaatttggttaaaaaaatattaaacaaggctttactgtcctacagaagttctagtctcaaatgatcgagaacctcaaaagtgaaatattaaaaatttttttttttcagaggacaagtaaggacactcttaggccagactatagctgaaagaacccagcattagttaaatgaagacctggctcttggagcttcatctccactgcgtgaccttgaatgagactcttaacctctcttagccttgatccctggtttgaggctatgtttgccttcagctcctttcactccctggattctaaagctttccctttttaagattaagatcctttgagtactttgctctcacatcaggtcgtcttaattcttatgctatggatttttagcaaactttatggtatttagaaactatataggcgatatttgggaaggtcagacatttttggaatgtataaaccaaaatgtaaggacagtaccccccttcaggtaagcctatgtcatcaaaaactagccttcatttcaattatgtacattatagcattaattttttttgtacttaaatctgacttctttttaaaaattattggggctgggcgtggtggctcacacctgtaatcccagcacttcgggaggccgaggtgggagatcgagaccatcctggctaacacggtgaaaccccgtctgtactaaaaatacaaaaaaattagccgggcgtggtggcaggcacctgtagtcccagctacttgggaggctgaggcgggagaatggcatgaacccgggaggcagagcttgcagtgagctgagatcgtgccactgcactctagcctgggtgacagagtgggactccgtctcaaaaaaaaaaaattttttttatattcaagaggtagatgtgcaggtttcctacatgagtatattgagtgatgatgctgaggtttgagcttctgttgattctgtcacccaaatagtgaacatggcatccaatagtttttcaacccttgtctccctcccttcctccctccctacccctttttggagtccccattgtctattgttcccatctttatatccatgtgtacccaatgtttagctcccacttataagtaagaacatgtggtatttggttttttgttcctgcattcattcacttgggataatggcctcaagctgcagccatgttgctgcaaaggacatgattttgtgttttttttatggctgggtagtattccatggtgtctgtgtacaacattttctttattcagtccacattgatgggcacctaggttgattccatgtctttatggcaataaattttttaaaaagcagaaagaaagctagatgtatacatgttacccaagtgtctgccttctccctttgagggtcaccttcctctaggatatagttcttctgctgtgcctgtgttgacctgtgtccctgcctttgtctccattgtcattctctcctcaccttcatgccgtctcctgggactgccttcacttcttacttacctgctttcccctctgttagaaaccaccagtcctcattcttccaatacagtaatgataaggcccaggcagagcaggtctcactaaaagcctggagatattagagggtggttatggagcaggacaggggaaaaattcaattcaaacattactgttagaaatttatcagccaaccccactgtaatgggcttgtggtaatgtgggaaatagaataactaaatggaacacttaatagtttccctttctttccctctctcttcttaggtctggaataggatctttaggacagagagggagagagcatttcaggacaagcaaagggaagggtgggagctgcagagagcaagttgccacttcacagtttgcctgcagctggctctactagcaaccatcccccacctagatgaatgtctttaaacagtcctttggctcgcggcctctgggcaagctgactacactgcaacgcaaagtctgcttgccgaagctggccaagttccgcattattctctgttagctctcttacaggtctgtctttgtgaacgctctttggggtgttcaacctcctagtgacagatatggagtcttaacactttttaggccccttgattttcttgggggataaaaagactcttccgtcaactcctctgatccaacttgtctgcagatcatgttgaaactcctttttgtcacatcctccagatcacaatgaaaaggcagattaacgtgattactgaggtccatcaactcatggctcttggttaaatgatacctaccatgaaccacaggacagagctctgcagacttagctggctgcctcattacaatgacttcatttaataaacttgctgtcagcagcttaatcctcagtcaagaagaagtatgagaatccttgttagccatgattaggcaacattgagggttaacaaaattttctcatgccccagcattcattttcattaaaagtataaatgaatttaaaaaaaaattgcaaaaagagcacctgattggcagcgactttttgggttttcaccatgaagtcctgttgcgagtaagccattttaatcgttcagcttgatttcacatttgggtttttgctgggaagtgtttcctatatggtttctaatccttcaggctcctcttctgccttacctgtccttgggtcctgtcaatcaagctggctaggtgttcttcacaactgtcattctgttaggggtgtgaaatatttcccagaggtggcagtgtaaggaagggttttctatctttcctcctgttagagtctgagatggagccatgctgagttcttggcagtgcccagggcactgttcagactggtagattctgacctgactttgagctcctatccccaacctgcctcttctggaagcaccaccttagtactctcccatcccccaccccagtgctgggagttcctgaagctctccacagacgtttcagaaatgaaagaataaggggctagagggtcccaggttccaaatgcacaactgttgtctctcttttctggacagctgtgtttatctgggtccttggagaagcagaggtcaagacaggattagacatgcaaggattttattagaggaaattcctatgtgagggaaaatggggagagagctgggaaaaggtctgggagctttcagagtgtgatgcaagagtgactccgcaccccagtgcaggagggagcggggagggaaggctgggtggcagcatcatagagtgctttgcaaataaagcaaggttaagcaaggctgctgtggagtctcagaaccgaagtcgtccaccagcctcagactgacctgccttggcatctgggcttcgtgcagtcattggcctcagtgcaaaggtgacatagctctcagaatgcagctctggggcccttggggaatgatccacgtagagttggaggcatgtgaggtgaggtgacttcccatggctgtcgcacagccagtggtgagagctgagccagatgcactgcaaaaagcagcacagcaaaagggatatgattatagttaaaatgaagaacaaaacaatgcaaggagcaccctgaccctgagccctcaccctaaccctaaccctaccagtgaggaagcacgaaggagtatttgtattgcctgggcctgtgagcttcactccagcaaggaactcccagcaagggacattccagcagttggaactcccagttccaactcttgtatctggtggtttgccatccttttgggggactgtttcttgctgtccttacacactagctctgagctcagttctctgattatttctctgaccaagggaagacatagatctttccttagagcacagctgagaccaggctgctgtgtggttctgatgtttccacaggcttgttgggggaacagcaaaggggtcttcaatagcattagctggaggggtttcttccaaaaggcccttgccttcccagggaccaaagaaaggtataaataaccacagctgaacagagttggttttaaacaaaataatcattctaagtagtttagctggtgctggcggaggagagggagacaggagttaccagggttctggccagtcctaggcgggactgtccagacagtatctcctaggaggggtgtcctgggcagaagggacaaggatgagggcctgatggcatgtctggaagtgacagatggggaaagtgatacaggtgctccctttcactcatcattggaacccaatgactgcagtgtcttcctaacccatccctctgcttccttctcccctccacactgccctcccccaggcaatccatcctgactgctacagttatttttcttgcacacaaatctgatcataatgctctttctgctaaaacctcttcaatggcctcccaggccttctggactcctagcatagcattcaaacgcagccctctccccactccttgactctcaccagcagaactcccggttccaacacttctctggaggtttgtcatcctcttgggggactgtttactgctgtcctcactcactagctctgaacttggttctctgattactgctctggccaagggaagacatagatctttccctagagcacagctgagaccaggctggtgtgtgcttctgacatttctgcaggcttgctgggggaactgcaaagggggctccccacagataagctagtgagtatgggcagccagctgtggctgcaatgggaacagctctgtccctggggcctctcttggcagcccccagcttgtggccctcatcaaagacaatttttccatctcattgcccaggggtatcttgagaatctctatatacttagagtccagtttaggagagctatgtccaggaagaggaagtccccacctcttatctcaagcctgcccaccatgttttaatgtcctgatctaggacaactggctttgggaagaacctgccctttaggtaggccacccacactgtcactcacagtattgtggcctcccactgtggccaatgatccaatgacctccggcatggacatctgcaggagatcttttgtctacagcatcatcatctccttttgtgtcccttgtgtgcttacgcttcagcctgagcctgtttaaatgctcattgctgggttttgctcctagcaatcctgatttggtgggtctgaggggcgctatggctgattctaatgcagcttccacctccaatgcagcttctctaagcttgtgtgtccaactctgtgcttgtattaatatttagaagaatggaatgggctcaacagtgcacagagctcagcttccaaagagaaatgtagatgccaaggtcaggtgcaaaggacaattgcagataggaaagtgagactgcggagtgacatccaagttcagggaacttgggcagatcttgttacccacttatagctaccacttgggtatcatttttcccatttgaaatctaagtctgtcaaatacatttttagtggagagaagaaggagatggagtgatttggggaatcaaaagtcaaatctaggtttttgggttttgcaccaaatttgatattgcctgcattgaaaagaacccctcttcttggattagattgaatttatttggtgcaaacccacgctctataaatactagtatatttttactttttaataccctgcatgaaagtccaacgatgatcagaaacggcagctattaaccttgtaatctccttaatgcaattaattaattagtaaattgctaccaatttgaactgagacatgcatccatagtcagtgtaaatataaagctgatgaaataaaaaatttactgttttcacattggcatttaacaatgaagtttttaataaaaggcaaattgctttatgtagaacatttacttaattgtatttgctctagtgggattttatctgaattatctggcatgtgaaggaaatgaacttagttctaactgaagaaaaacgaatcatagggagatttactacaataattttcaaggactgcatcgagaggactcatcaattttattctgtatccactatagagggaactaaaaaacagaaaataaatgtaccctgtaaatgtagcagtgtgctctactggagattaaatctgtatcttccctctgttctagcaagaaaggtttggaaagatatcttgtttccccctgcttttttttttttttttttttttttttttgagacagggtctcactcctgtcacccaggctggagggcagtggcaatctaagctcactgcagctttggcctcccaggctcaagtgaccctcccacctctgcctcctacaggcacatgctgccagcctggctaatttttaaattttttgtagagatggggtctcactctgtttcccaggctggtcttgaacttctgggttcaagtgatcctcctgcctcagcctcccaacgtgctgagattacaggcatgagtcaccatgcccgacgatatcttatttcttagggagaataaatctttgaatgactgaaagtacactgtctcctgctcctatgtagaggtctgagactcctggagacatggagaaagattacaggtagttttattttttagaaaaagaggtgtgagcagacattttgggaccagggtctgggtggagagactaataattctccagaggatgcttggagcagagatggtgcctggggccctggggccatgaggcagtgaaagctgagcccacctggatcctgcattctagggttggcttgcagtccacaaagtgggggaggaagggagcacagagaaatagctgtgaagactggcatcctgccagcacctgaggcaagagtggggcagaggacccacctggcctggcctggtgtgtgcccgtgtccctcgttcttggcttgtccgtcctacccactgaggctctgctccagggttctcttgggggctcctgcaggcagtgacacccactaacccagtcagggagaggggctccagtgcccacactttgaagggtgtctgaagcatgcaagtgccccctggggaaatgtggatgagtcagaagcgctggacatctcagttacatagggcttagttgtgaggcagagttttctgataatgaggtgtgttagtcactgggatgaagaccaagtgggctttccttagggacctttgaaataggcaagtctcatccatttgggggtggattttggatttcgtgtggtcttgcctagtagggaatgggggataggggatggagaaggaaaggcagtcaaggataacaaaacaagtttacttctcacactaggggtatctgcttactcagttgctgaaatccggatgggtcccatcattgttcctgcttctggtttgttagaacttccccagggcacattaaaacaaatacagaaatcaggtgcattatcttttatgcttggtttcataaaaattaattgcagaaaaaatatatgctgtgacatatgctttctatcccaccaagagaggaatcaatgtagcactttctcttgtgaatagaactcaatagttctcctttgtgttgtaaaatggtattatagtcatgccagagagtggcattgcatgtaattacaaacctgttgagttctgtgtttaagcccagtttgagggaatgtggcgctcagggtttttaatcacacaggattaaacttggctttcaagttttgtataaagctagtgtagctggtaaatgtgcattctgactaccagtgtgaagaaaaattaattccattcagggaactcggcctacatgcactggtgctgttggatccgttttgtggaaagggacagtgtccttcctgctacagagctcatgcttgattggtctgtattagtgtcatcctggctgtcaaaatattttgaatatttcttctgacttacatctgcactccttttttcacatgtaggttggattaccaagctgtaacccaagatgagctgtccaaccatgaaaataaacaccactgacatgtctaaaatttatgggcaactgatgaaatgcagtagatttacaaggagctaccccccaggcttcatcaaatgaggcaactgagtgctgttgaaataattgttttatttacagttccttaaacttccagtgggcagactaccaaaccagggttgatcatacctgggaccgtaggtcagtaacatcccttacttgtaaccatttctccctagagtccagactagtggacatgctcatctggtccaaccatgttctggcctccatgactctgatggttcagcttactaggtcagctctcatggagttgtacatatgctttcctgcaagatcaagaaagttgatcccctggtcaccttgaatccctagtcctgaatgttgtattctacactgaatttctcagatgcatcactctgtctggaagggctgagaatggggaggaagatgggaaaaggtaaaaagctttgggagttatgtaacaatgttgaagttggagattgtatttctctcgttcatttttcctgggccattgtaaatacttcttgcataagcacagccagtcatatgtggtaggccagtcctgacctactattccaaacatataattatgacttataataataataataagtaggactataattatcatgtagtgatggagcggccatgtgctgaacacagggctagatggtttcacatacattatctcatttagattttatttatttatttttgagacagggtcttgcgctgtggcccatgctgcagtgtggtgacaccgttatagctcactgcagcctcaaactcctgggctcaagtgatcttcctgctttagcttcctgtgtagctaggactacaagtgtgtgccaccatgcctaatttttttttttttaatttttttagagatggggttttgctatgttgcacaggctagtcttgaactcctggcctcaagcaatcctcccatctcagcttcctcaagtgctgggattatagacataatccactgcatccagcctcatttagtttttagaacaataatcctgcaaataggcatttcccatcttttatagataaataacctgaggctctgagagacttataactcactcatttacttagcccagctcggtctagcaccaaagccatctatccttcccactttgtggcctcccaaggaaacccagtggtcccacctgtccaatgcattttctgaaatcaggtctgagtaagtatttcacgtgctccaacttcatatgcaaacttcacgtatctttaaaattcccttgctcactcctctagtcaaggttatcttgggcacagagagttctttaaatattccagccacctgtcacccaaggaatgttctgaaccctgacagtctctgaagtgttcctgcccttgcatgaaaatgactctatctggtttataattagaagtgaaatgattttaaatggcttccacatggcttagttttccaagcagttccagttacatagaacttcatataaacagataatgagaggctagagttggagagcacagttcctgcttccaaattggcttgaagtggggacatctgctctgcatgaagcctgggtcaggctgcccctctcatctgtgacctcctgtggtcgggagggacttgctctggattatataaaggcttcacaagagtactggaagcggggacggaatcaacttgagcaaaaaacctaattggcttgaatctttccttgaccatcagtaattattttgagattgatagcctatcttataataaaataactgtttcctttccaaagaaggatttcttgccttggttgcaagtccaaacaatttcatgtaacaggctttcacaaagatggcctgatatgagtctaatgacttttcttacaatgaattacgcagattggaggatatttactcaacaaatttacttccaaccttcccctccatattctcaacacatacacatagccttttattactattattattattttcttgagacagagtcttgctctgtcgcccgggctggagtgcaatggtgtgatctcggctcactgcaagctccgcctcccgggttcacgtcattctcctgcctcagcctcccgagtagctgggactacaggctcctgccaccacgcctggcttatttttttttgtatttttagtagagacggggtttcaccatgttagccaggatggtctcgatctcctgacctcgtgatccacctgtctcggcctcccgaagtgctgggattacaggcgtgagccaccacgcccggcctattattattatttttaattccaaaactggatggagaatgtgggaatcgaaaaattgtgcacgttgtagagcctgggtctgaggtttcccttgaaactgtcattggtcttccagaagaccagctatcccagatatattaatagtagaatcgaagggccctgagatacctgacttcagaaattcttgagttcccaaagcctgcataaagctggaggctcccatgcatgaagcttggagggccggtatgtgctcatgagagaggcagagggagagtgttttccagaatatcaatctagggtcctagcaacccctgctcaacagtgtttcttcctttcctcagcaaatccaagtggatcccttctttgtatgatggttttggggtctgtcttttccatagattctttctgccaagtctggtcttcactgatgcagttaattaataaatctcatctattttaatttaatgcttgaatgagtggctactcatgcgaggtattggtctaggtatgctcggtagggctgcaaagatgaaccaaatttagattcttccccaagaagtttacagtctaccaggagagaagtcaagtatagctggggatgggaagggatgcaaatagacacaccgttactatagggtgtgttaagatagaaggagacaaaatgtaatgaaagaagacaggaggaaatggccccagtgactccttctcataaggggcagagaacccctgaaaaggcagtttctagtttgaaagttctctgagatacgtaatgtcttcttgagccaggataaatctgctttgggcttttatttctatttctttcctagcttctggaaaaagggctatcatggaggatgttgacagcaggtttaaaatgggggggcatggtttgggggtttggtgagccccacccatagatgtgaagccagaaggaggaagcccagtgctggtatggcttcctgctcaagaagatgccagagcctctgagcaggagtcatggtccaaggaggcttgtgactctcttgtttaacttacagctttaaaggaaataacgtctttgtagcaaaagtccaccaggatttgcatttgtatttctaaaaacagaggaagaatacacaaaaacctgttgacaaatattgatagcagcttcatttgtaatagccaaagactgggaataagctagatgtttctcagtgggcgaatggttaaataaactatggtacatctatatcactgaatactgctcagccataaacaggaatgagttactggtgcatgggacaacttggatgaatctcaagggaaatgtgctgagtgaaaaagtcaatccaaaggattacatattgtatgatttcatttatataaacaataacacatggtagagatggagagcagattagagatggatggggttagcaatgggagtgtggggtgggagtgaggtggatgcatgtaggtagttataaaagggtaacaggagaaggaagccttggaatggttctgtatcttcactgtagtagtggatatgctaatctacacatgtaataaaactgcagaagcccagacgtacacacacatgagcacacataaaaatgaggaaatccaggctgggcacggtggctcacgtctgtaatcccagcactttgggaggctgaatcacgaggtcaggttttccagaccagcctgaccaacatggtgaaaccccgtctctactaaaaatacaaagaaaattcgccaggcttggtggcatgtgcatgtaatctcaggtactcaggaggctgaggcaggagaatcgcttgaacccgggaggtggaggttgcagtgagctgagcttgcgccagcctgggtgacagagcaagactccgtctcaaaaaaaaaaaaaaaaagaaatttgaatacaattggtggattgtatcaatgtcatttttctggctttgatattgtactatgtgtactatggttttgaaatatggtgtgattagcaaaactgggtaaagggtacaggagatgtctttgtactatttcttacaagtgcatgtgaatctataatgatttcaaataaaaaagtttaatttaaaaagaagaaaaagaggcttgtgagcttccttaagcctgtgacttgcctaacatttatcatgtttgttaccttccctgacacaagcaggaggtgagcactggggaggttctgaggatagaaaattactcctggcttaggggtagactggctccatggaggaggctgaatggcatctgaacactgaaagactgtccagaattggacacataaagtctaaagggagagtgtataggtaaagacagagggcaggacagaatgggatgagaatgtgaaatgagacgtaattggatctggttgggaaaggagggaaggagtgggggtaagagtggaaaagaaggtgggggacaaatcatggtagttgagaagactgggcaatggggaggtcattgaagactctgtcagggtgctgagctgtgcttcagggagatcagtctggcagcagtgtaggcagagaggtcagatggggatacagacggagagaaattaggaacccattcctgtaatctgggaaacagagaggtgattagtcaagattaatttcctctgcctgtactaggaacgtttacaagttaagtttatttctctctcatataaaagaagttatggtaagaagtccaaaattgatgtgtaggcaccacaaagttaacagggatctagtccttttctagctctctgctgtgccatccctagggtgctgcagtcattctcaaggtcattccagcagcaaagttgaggaatggggtagaaaagcatgtttttatagaacaacttcccagaagtcccacataacatgcttgcctacttcccattggctagaatttagtcacatggccacatctaactggaggggagtctgggaaatgtagtcttttagctgggtcgccatgtgcctggctaaaatggagagttcattcattaaggagaaaggggagaagggatgttggggaaggcaaatggtaggttatgcctcagagtctgaattcaactagtggtgaagagaatggagaggagagggagaatatgtgagatatgcaggtacataatgactgggcttgacaagtgattagaaatgggttggaaataagagaggtttggagcctgagtaaagtgaagtggtggaaaccatagttaatgtgtgccaggcactggtctaaatgtttttgcacgtatttcacattgatttctcatgacaccactatgaggtaggtcctgctattattatctcaattttgcagatgaaggaaatgggacattgaggtaatttgcttgcccaagtgtcacagttagtagcagaaccagaatttgaacctgggcagctggttccagagcctgtacccttaagcactactgtaaactgaatctttctgtcccctcaaaatttgtatgttgaaacttaatctccagtgtgatggtatttggaagtgggaaggtccttgggaggtgattagatcatgagagtggagtcctcatgaaggaaattagtgcccttataaaaaagaccccagaaagctccctaccccttctgccatatgaggtctcagtgagaagacagccatccgtgagccaggaggagggcctgatatggtttggatctttgtccctgcccatatatcatgttgaaatgtaatccccagtgttagaggtggggcctggtaagaggtgattggctcatgggggtggtttctcacagtttaacaccatcagccttgatgctgttatcatgatagtaagttcttgtgagatctggctgtttaaaagtgtgtggcacccctctcctctctcttttcctgctgttccagccatttgaagtgctgtctgctccttggccttctggcatgattgtaagcttcctgaggcctccctagaggatgagtacatggcagcatcatgcttcctgtacaggccgcagaactgtgagtcaattaaaattcttctttataaactactcagtcccaggtatttatttatttatagcaatgcaaaaacaatctaatacaaggccttatcagacactgaatctgctcatgccttgatcttggacttctcagcctccagaactgtgagaaataaaggcttgagccactcgtctatgatattttagttatagcaatcaaaatggactaagacaaccactatgcctgtggtggcactgtgaatagagagagagggaacagggaaatatctagatctgtgtgctgataccactttttttctccacattattctcctttttccttgattatatttaacttctgtggtgctcagttgtaggtggtatagaaaacttgttgagttgactttcccatgtgggcttggaagagtacacaaagtgctgacaacctgtcctttgttttggtcattgacaatttcaagccttggcctggggtgggcactgagcattggcaatgccttgtggggtctgggggtggttctgggggctgcattccagatgtcccagttggtcaggaagtagattgcccagaacctatattaccaggtccaaatgggacaagagaggaaggaaaagccaagaggcaagctagtgggacccagagccttgggaagctcatgcctcggaaagcctgggtggggagctaggcttaatatggtttctggggagcagtaggcagctctgctctccaagggctggggatgtagctctagaaaggacagaagggatttgttctgtggccaaatgtaacttggaaacaatattctgtctgccatttctgttttgcaaaaagtgtgatagaggccaaatccatgccagggctgaagaccaagaatggagtaatgtctgcagagagaagggtaattagcaaattccttaattagagttgggttcctgttttcccagtcaattctaatcatttgctagattttaacacagcttctttggcctgcagggtacagccatagagttcagaaaaccaggatccagtgatcttggataaagtaagtaagacctggtttcctcttccgtaaaaagactatcacaacatttatttcttgaagctgtaagaatccaaaaagtaatatgtaaaatgttggcaagctctcaaggttagttatttattacattagtgataatgatgccttattagctgctaatgtctgttagtgaatgcttctgtgtttaaatttcatgcttcattgaatcccactgatttccttttctcaccaaggtgccattctgcactgacacctgtaatcaaagcttgaagatttacttaggcaccaaaagattaatcttgataaaattcatgaagtttctgttcactagacattagccatcacccctgatatgtgacatccttctcttattctgatttctaaacatatatttaaatataggttaagaaagtatcatttcagagccagtaagttaactggggaaaaaaatgggctttctttgaataagaatctcacactggattgaacctcaatgttttgatatatggtgcctctattctagttgttactaaatactttcattttccattccagttctttttctttttcttcaaccaagatttaattgctggagaccaagctcatttgtaattattccgtggtaaaaatatagacaggaataagatgtagtcctgtcctcaataagctcatagtctgggagagaagacaaacttgaaaataaataattgcagtacatgagacaaatgccattgaataaatatatacagggtacagaggtggcatctcaagaagaaggaacaaaaatgccttggcatttcaactgggaggacaaaatacgtgttggtatcatcactgtctaaatgtgtaacctcagaattcaccaatcacttgacaaaactggattctttcttgcatgtaatgttagttgaatcttttgaattccagagattgagaagtaatttgggtttttattagttctagtctcttccttctttcatctcattgtacttcttaatccctaatttatatacttataatgtaaaatgcatttggtcatctattctgccctcaatctctccaacaatttttctatgtctggtttttatttttccatcataaatctttaatgtgcatagctgtgttcctttccttgaaatccaaacttgccccatcatatttgcaaaaatttgaaagcttgacaatacactcattggcaaggctatagggaaacagctattcttatccattgttggtgggaatgaaaaatggcataatttttatggaggggaatttggtaatagctaatgaaactatatgtgcatttatcctttgacccagcaattaaactaatagtaatttattctgaagatgtacttctaataatacaaaaaaacccaaatgcacaaagttattaattatagttggaaaccaccttaatgtccaaggataggaaactgactaaattatgggtactcacacacaatgaagtactatgcagctgtaaacaagaatgagtggctaggtaggtggctcacacctgtaatcctagcactttgggaggctgaagtgggtggattgcttgagcccagggattcaagaccagcttaggcaatgttgtaaaaccttgtctttataaaaaaaaaatagaaaaattagtcagaagtggtggcacatcactgtagtcacaactgcttggaaggctgaagtgggaagattgcttgagcctgggaggtgaatgttgccatgagctgagatcacaccactgcactccagcctgggtgatagagtgagacactgtctcaacaacagcaataacaacaacaacaacaacaacaacaaagaatgaggaagctatctatgaactgatgtggaattatttctaagagatattgttaagagaaaaaaagcaaagtgcaaaataatatatatggtatgctatcatttatgtaagagagaaggaaaaatgagaaaacatatatttgtttatctctacaaaagaaacaaaggataaatcaggaagcattaaagttggtgaaggaaatagggcagaaaaaatatggaaggaggaatacttctctgaatagatctttttgcatagttttgaccttcagaagcatgttaatattttatatattctaaagtaaaattaataaggatggaaaagggcaaaaatccctaaaactgaatgcaaactgaaacaaattagtcaattgttttgcaaatgaataccataaccaccttgaagagaaaaaaagaaaggactaatcctagtaacttatgaacatagtatttgactatataccctcagtcttaggtgaaggaatacatagaattgtgcataaattctgaacttttttttaagtagacttgttttttgtagtgatagaggaaagtaattcttttttttcttctttttttttttttgatggtgttttgctctgttgcccaggctggagtgcagtggtgcgatctcggctcactgcaacctccgcctcctgggttctaccgattctcgtgcctcagcctcctgagtagcagggactacaggcacatggcaccatacctggctaattttttgtatttttggtacagatggggtttcgccatgttggccaggctggtctcaaactcctgacctcaggtgatccgccaacctcgggctcccaaagtgctgggattacaggtgtgagccactgcatcctgccgagaaaaagcaattctgaaacaactttatatttgtgaaagttgtcacaatcaaaaggaagtcacttgtgttgaaatcctgacaaatgaagccagggaaggttatgaagggcgggttctcataaatgtatgcctgatagtaagaactttcgcaaaacactgcaaaaaccacaaccttgcacaaaggccactgtaactttacatagaaaatactttcacaaggatgtctgttcagcaactgcccatccaacctcagactgacaccacccttgttactgatccttgtagccaaggataattgactcaaagcaaattatgtaatccccctcatttttcctttaaaaacttccatttgtctcaacctccctgaataggcacatagtttactatggcatgtgcattcccattgcaatgctactccttaataaatatcattttcttttagagagtctcccactctgtctgttatttaggtttgacatatgtattataggagtgagcaaataagtaaatgtgttactattgggaagcagggttctcattaaggaaaaagtgacaatatatggaatggggagaaagcaagaaagagccctgttgagatggattgaaatttggggtatcactgtgtattatatttctaaaatgcatatgtatgtgtgcatgtaaatttgcatgaatatgtacttataaatatatatacctgtgtgtattacctagttttgtctgctgaaagggccaagaaacaataacacctcagtggccaatggacacatcttgtgcccagatcttggtctctaattccattccccaccaaaaggactcagggctctcgggagaaccaactgattccaggctagggcaggactgttaacaggtgagcctggaactttcttaatttctagtataacagaatgttctgttatgctgatactagaaattaagaatgagctcaaaaagagatgggaccatgtcacaaggacacaggagccagcctgaaagaactcccactggctaaatctgggacaatttaagtaattaagtataatgatgaattataaactattaaaaatcagaatttatgagtccctattgataataaatgggttaaatatttatatgaggaaaagcaagggctcttgcttacagtgaaatgctgaatgccaacttataaattgggaggaagggctggagctgataagttagcattttagaaccattacagcaaagatcagcaagaatcatcaagcaagaatcatcaatggatgcaaaaactagggaggaatttagataaggaggaggatatttgtttggtctaaaaatatctccctacatactattagttgcaagggaaaccaaaatagcaattatactgtagagaaatttgacagcttgactgggttttcaaaatctgcaatgagggcagatggatgttgtgtgcctcctgatgtgatgccttgggaaggacacagtggcacctctgtcgtattccagccaagaatgtataacccgagtcatgaggaaatattagacaaactataaatgagaaacattctgttaaaaacggggcagggctctagacttggaaaatgtcatcatggaggacaaagaaagggtctggaagtgctccagatcaatgaaggatggagacagctgaactcaatccctgaccctagactggattccattctggagggggaaatgctataaagacattattgggtcaattgacaaaaatgggacagtagattagataaaagtaatgtttcattgttaaatttactgaagttgaggatgatactctggctatatgagaatgtatgcacgtacacacgtacagtgattatttttttggagacggagtctcactctgttgcccaggctggagtgcagtggcatgatctcggctcactgcaagctccgcctcttgggttcgaccgattctcctgcctcagcctcctgagtagctaggactacaggtgcccgccaccatgcccagctaatttttgtatttttttagtagagatggggtttcaccatgttggccaggatggtcttgatctcttgacttcgtgatctgcccacctcggcctcccaaagtgttggaattacaggcgtgagccactgcgcccggccaacatgtacagtgattcttgaacagtgtaggggttatggacactgaatcctcccatggtaaaaaatcctcatataatttttaactcctttgaaacttaactactaattgcctactgttgatcagaagccctattgataagataagcagttaatgagcatgtattttgtatgttatctgtatcatatactgtattcttatgaagtaagctagagaaaagaaaatgttattaagaatatcataaagaccgggcgcggtggctcacgcctgtaatcccagcactttgggaggctgaggcgggcggatcacgaggtcaggagatcgagaccatcctggctaacacggtgaaaccccgtctctactaaaaaatacaaaaaaatagccgggcgtggtggcgggcacctgtagtgctagctatctaggaggctgaggcaggagaatggcgcgaacccgggaggcggagcttgcagtgagccgggatcacgccactgcactccagcctgggtgacagagcgagactccgtctcaaaaaaaaaaaaaaaaaaaaaaaaagaatatcataaaaaagagaaaatacatttgcagtaccgtactgtatttattgatgctgtaagtttgcgtcatctgtttacaagatgaatcgtccacctgaaatgatggcaaccgcagctgcagacctcaatctatcgtacatatcaagcaatttaactttttcttgtaatgtcatgacttttctctgcttcttgggagcacttccagcatcacttgtggcacttgatatgggtcccatggtgttattcaaagtttacagtgttgcagtaaacacgatgaaaaatacacgagaaccgccagagatcacattttactgtgatgaaggagttactggagagaccaactgctcacgtggagatgattagtgttgctcagcatctactcacatcatttgtgcccactgcaataacagtaggcggtagctatgaaattattacagtaatgcagtatgtactgcagtgaactttatgcagtgacaatttcaaactacatctttatgtgtgtttacatttctctccactgtgaatgataccacgtttggtctggaagtatttgtgtgtgtatgctttgataaatatcatcttttaataatagatttgtgtatattttatggttgtaaatgacaaaatagactagtatctacatatattttcataacatacctaattttttcttaatttttaaagctatgtggttaaaatagcttcatctagggtattttaggctatgcgctttatctgcaagttttttcaaattgttgtaaatctccaaaaaatttccaatgtatttattgaaaaaaatccaggtatatgtggaccagtgcagttcaaacctgtgttattcaaggatcaactatacatctagaaaaagagagagagagagagagagagagaggaagaacaaataataaaacaaatgggttaactgttaatgggtggatcttggtaaaagaaatacaggcattcttttttattcttttttttttttttgagaccgagtctcgctctgttgccaggctggagtgcagtggcgcgatctcggttcactgcaatctccgcctcccgggttcaagcagttcccctgcctcagcctcctgagtaattgggaccacaggcatgcatcaccatgcctggctaatttttttttttgtattttagtagagacgaggtttcaccatgttggccaggatggtcttgaactcctgacctcaggtgatctgcccgcctcggtctcccaaaatgctgggattacaggcatgagccactgcacccagcctagaaatacaggcattcttttgctatttttattcttacagtttttctcttaagtttaaaattatattcaaataaaaaatattcagtcctgcatatcctgctttggttcaggaacatttgtcttcctactatgccgtatgttggttttggttctggggatcctgttgatgtctgaccacgtcttagaatagataacaccagtaacttaaaaaacttttattctgggtagtgaagcactttctttgcaaatgaaatcttatgtggggcatcaagctgcagaggagatgacagaagccgctctaagagaagcatgtgtgcgcttgttgggtgttgtatcagagtcctgcccactgtgcctccctctcctctgcccgctgggcagctctgaggcacctccagggaatgtttgacaaccactgctcgaaattaaactggccacggtccaactgaccttagcaacccctgaatgagaatgactgttcttgattgggtgaaaacctcagaatgacttcagagcagttgacttgtgctttgtgaacatggcctcatgcgtgctttcagtaataaatgtccagttttttttcctgcctctccatgaggttactctgcccttggcctgtggttcacacttgacaactattcagccacagggccctgcaggtcaagcccagcgtgtgatggtttcagagtcgagtcctttctgaagaagcgtgtatagatcagacttacgtaaatagaatcacatttccccacagctgcttcatggtcatttgggattcattttcaaatggccatggtatcttgctgcaggtagaatttatatttatctatcttcctcctttccttttctgtcaggtagttaagagtctttgacacgtttggtggaggggagcttggcatttaaagcccttttgaaagtgacttaaccccccaagttaactgctctgaaagttggaacctccaaaaatttatatctactttatagctcaaacctgagtcaacctaaaacgtaagagtattatttattcaaggagccttggaagattgtacataacaaattcattttgttgaagaggatgcagccatcttcttaatgatttacctcaagtttccataaagctttttgcagggcccaagactgcaagacccttaatggccacccaccccattgtaatggtagtaacttcctggagtcctatgttgaaaagctttctggggtagcatctgggcttggtgagaatgagggtcatgatcgatttgtgatgtctacttgggtgtggaatggggacattatccgggtgtttgaagcataagtgatgttcctggcctaaaaataactctcaggagctctgtttgtttggaaagaacatgcctcttcattggccatgagcactggtctattttatgtgctttcttactaacaaggaaccctggctgtgatgccctagattagatatgggaggaacaagagaacacttgttgaggctttgggtgtttttcctgcacaagtatttccaacccattgcaacaaaggagcccttagtacagagtatggcagaatgaagtgcacccccacccccagcctgtaccttgtttgggttcagctggttggcatgtccatattgaaattttagaatcgggctgggcgcggtggctcagtctgtaatcccagcactttgggaggccgaggtgggcggatcatgaagtcaggagatcgagaccttcctggctgacatgctgaaaccccgtctctactaaaaaatacaaaaaaattagccgggcgtggtggcaggcgcctgtagtcccagctatctaggaggctgaggcaggagaatggcgtgaaccctggaggcggagctggcagtgagctgagatggtgccactgcactccagcccgggccacagagcgagactctgtctcaaaaaaaaaaaaaaaaaaatttctttttaaaatttcagaaccttgaaatttcttgtagttgcacgaactctgtgatgtttccttgtaatttaagtgccaagaaaatttgaacctggcagacccaacctctctcgacacctacctcaatactgaggcataagaagcagaatagaatttagagaaaattcttctgtgaagctatgcctgatactcacagatggattcaaggggggattttcctccctcgaatcccacagcatttttaacctcttaggttaactatgaagtgctgtttggctttttttttcagtaggttccccttcatccacctcctgccttgtagatgatgaaaatcttctaatgtttaatcagcaaaaatgtttcaaggatgattattatgttttacttttctttgtcttctcgtcactcctggcagtgttgcaaagaccccttcaaagactcttctaagaccctagtatgtgtttgcgaagtgacttatttcaaagacacttgtttttgaaagtattctcagggtaagaataaaaaggctggctgagccatgttaacctaggcaatttgtgatggaattgtgccttccatctctctgccttttcccccttctccaggagttcggatttgagttgcttttggaaatcctcaaagatcaactttctgaagctgaatagctggagatgttcttattgggaggcagcatattaaaggcagcactcagaaggattcagtgcttgttgtattcacaaacagccctgactaaggaagactgtgtgaatgtcgtcatatttcccaataacacatgcttgccttagccagtgtggccctcccttctctgaagcagaacacaggtccttatctatgcaatcctttcaggtcagaccttgtttacatggacacttgcctgcatatgtcctaactttggggccagataaataaacaggaggctgaaggcaaaaatacctccattgaaagaagtcatggctagaagtggggccccagagaggagcagaaataggtgcaaggaactaagaaagagcagcttaagccatactatttagagtagaaaaggagggcccacatttctattttgaaacttgtataaaatggctctatcttacctctcctcctctcatattctccttccttcacagaggaatctgtgaagatcttgtaattaaaaagttgaaactagaaaaaaaaatagaaaatgacacctctagatatgctttgttttttgattcagagaaactgaaaacacattaaaatcagagtttcagataatttttatgtgactctccttcaacatagtgtcccagtttcattctatccaagtggatggtcttgacatgaccatggtttgagatactttgaagagtcaaagataataatttttttgtttatggaagatgctaaaaaaacccgaggcattttgtaattttgaatctgggtagcttactgataatgaccaactggaccctgaattccaacagataatctaagactcacgtacctaaatatacacatcagcactcctgcctgtctccccaaactcacctccagtttgcccctgcctcaccaggctccaggcccgtttctgcttcaaggttgcctcagggtgctgttctctgtcctggaagaatattctccttcctttcctactgcaggcaggtggcctttcctaatcaccctgatcactga

SEQ ID NO: 486 - DNA, 20001 bp, Homo sapiens
acttttgggatttgtggttggttggttgtttaagggaaacatctttgcatattgataggaaaagattagtgaagagtatacagggccgtgcccggtggctcatgcctgtaatcccaacactttgggaggccgaggcaggtggattgcctgaggtcaggagttcaagaccagcctgaccaatatggtgaaaccccgtctctactgaaaatacgaaaaaaattagccgggcatggtggcgtgtgcctgtaatcccagctacttgggaggctgaggcagggaatcgcttgaacccgggaggcagaggttgcagtgagctgagactggggcactgaactccagcctgggtgacaaagcgagactccgtctcaaaaaaaaaaaaaaaaaaagagtatacaggagaatcaatcaaagaggcaaggagcttcttgaggaaagtggcagagaacggccttggtagaagactcctcttccattacatcccaagagaagagaagacaaagtactggtgctttgggggttgagggagcagaggggcaggatgttgaaggacttctttcatttcattcagtcaacaaagacctattgagtcttccctatgtgctgaacacaagacatactggcttcatggagttcttagactggtgggggaggcataggaacccagtgaaaaaaattaaaactggggagctactttggttaggttggtaaggcctctccaagaaagtgacatgtaagatgaaatctaaaggaagaagaggagctagtcatgggaaataacttcactcgactatttttttaattaaatttattgatttttattaattgacaaaaaatatatattgtgtacaacaggatgttttcttttttctttttttttttttttttgagacagagtttcactcttgtcgcccaggctggagtgcagtggctcaatctcggctcactgcaacctccacctcccaagtcaagcgattctcctgcctcagactcccaagtagctgggattacagatgcgcaccaccacgcctggctaatttttgtgttttcagtagagacggggttttgccatttcggctaggacggtctcaaactcctaacctcaggtgatccacccacatcggcctccgaaagtgctgggattacaagagtgagccaccgtgcccccggccaggatgttttaaaatatgtatacattgtgaaatggctaagtcaagctaattaatatatgcattacctcatatttttgtgctggaaatgtttaaaatatgttctttaagcaattttcaagaatacaatacatattcatagtgggtatagtcaccatgttatacaatagatcttttctttttttttttgagacggagtttcactcttgttgcccaggctggagcgcaatggcgtgatcttggctcactgcaacctctgcctcccgggttcaagtgattctcctgcctcagcctcctgagtagctgggattacaggcatgcgccaccacgcccagctaatattatattttagtagagacggggtttctccatgttggtcaggctggtctcgaactcccgacctcaggtgatccgcctgccttggcctcccaaagtggcctcctgaacttatctctcttaactgaaattttgtatcctttgacaaacatctcctcagcctctagtaaccaccattctactctctacttctgtgtgttcaacttatattccacatatgagagaaatcaagcagtgtttgtctttctgtgcctcatttatttctcttaacataacatcctcccagttcatccatgttgtcatagatatgagcatttccttcttttttttttccttgagacagagtcttgctcttgttgcccaggctggagtgcagtggcacaatcttggctcactgcaacctctccctcccgggttcaagcaattctcctgcctcagcctcccaagtagcctggactacaggcatgtgccaccacacccagctaatttttatttttagtagagatggggtttctccatgttggtcaggctggtcttgagctcccgacctcaggtgatctgcccaccttggcttcccaaagtgttgggattacaggtgtgagccaccgcacctggccagcatttccttcttcttttaggctgaatagcattccattatatatataaatcacttttttttttttttgagacagagtcttgctctgccgcccagggtggagtgcagtgacacaatcccagctcactgcagcctgtacctcctgggttcaagcaattcttgtgcctcagtctcccaagtagctgggactacaggcacgtgccaccatgtccggctaatttttgtatttttagtagagacagggtttcaccatgctggccaggctggtctcgaactcctggcctcaagtcatctgcccacctctgcctcccaaagtactgggattacaggcatgagtcactgtacctggtcataaaccacattttctttctttctttctttcttttttctttttttttttttttttttttgagacggagtctcactctgccaccaggctagagtgcagtgatgcaatctcagctcactgcaacctccccctcccaggttcaagcgattctcctgcctcagcctcctgagtagcagggattacaggcgtgcaccactacacccagctaatttttgtatttttagtagagacgggtttcaccatgttggtcaggatggtctcggtctcctgacctcatgatctgcccacctcggcctcccaaagtgctggaattacaggcgtgaacaaccacgcccagccaccacattttctttatttgttcatcactaatggacacttaggttaattccatacttggctgttgtgaataccactgcaatgaacatgttagtatagatgcctcttcaacatactgatttcatctcctttgaatatatatccaatagtgagactgctgtatcctatggtggttctgtttttaattgtttgaggaacctccatactgttttctataatgggtgtactaatttacattccaccaacagtgtgcaagggttccctttctccacgtccttaggaacaatgttatagtagccattcgaacaggtgcaaggtaatatctcattgtggctttagattgcatttccctgatgattaatgatgctgagcattttttcatatacttgttggccatttgtatgtcttcttttgagaaatgtctattcagatcttttgcccattttaaaatttgggtattaacccctcatcagatatatggtttttaaatgttttctcccattccatacgttgtctcttcactccgttgattgtttcctttgctgtgcaaaagtttcttagtttcatataacactatttctctattttcactctttttgcctgtacttttggggtcatattaaaaaaattattgcccagacccaggtcatgcagcttttcctctatattttcttcttctagtaattttagtttgaggtcttgtgtttaaggcttaaatctatttggaattgatttttatttgagacagggtcttgctctgtcacccaggctggagtgcagtggtgcaatcaaggctcactgtagcctcaaagtcctgggcttaagtgatcctccctcctcagcctcttgaatagctgggtccgtaggcatgtgccaccatgcctagctaatttttttatttttagtagagatggggtacgggggtctctctatgtttcccaggctggtctcaatcttctgggcttgagcaatcctctcatctcagcctctcaaagtgctaggattaaaggtgtgagccataacacccgaccttcgatttttgtatatggtatgaggtgagagtctaatttcattctgcatgtggatatctagttgtccctacaccatttattaaaaagactgccctttacccattgtgtgttctttgcaccgttgttgaaaatcaattgactgtaaatgcataggtttattttgggtctctattctgttctattggtctatgtgtctgtacaaatgctattctatcagcaaatgttgggaagtgggagagggacagaagatttcagaacaagagtcttgaggtggggaaaaaaaacagtacattttaaggccgggtgcagtggttcatgcctgtaatcccaacacttttgggaggccgaggcaggtggatcacctgagaccaggagttcgagaccagcctaggcaacatggctaaactctgtctctacaaaaaaatacaaaaaattagccgggtatggtcgggggtcgctctgtcgcccaggctcgagtgcagtggcgcaatctcagctcactgcaacctctgcctcccggattcaagtgattcttctgcctcagcctcccgaatagctgggactacagctgtgcatcaccatgcccggctaatttttgcatttttagtagagacaggatttcaccatattggccaggctgttcttgaactcctgacctcgtgatccgcccgccttggcctcccaaagtgctgggattacaggcgtgagccaccgcatctggccagaggaattatattttaagagacaggatctctctatgttgcccaacctgatcatgaactcctgggctcaagggatcctcctgcctcagcctcctgagtaaccgggactacatgtgagagccaccgtatgcagccattggaggatattaagtagggagggctacctaattcatatttaagaagttgactttgggccatgtacggtggctcacacctgtaatcccaacattttgggaggccaggctgggcagatctcttgagcccaagagtttgagaccagcctgggtaacatggcaaaaccctgcctctactgaaaacacagaaaaattagctgggtgtggtggtgtatgcctgtggtcccagctacgcagaaggctgagatgggaggatcacctgagcctggggaggtcaaggctgcagtgagcactgatcgtgccactgtaccccagcctgggtgacaaagtgagaccctgtctcaaaaaatatatacattaattaattaaaataaaaaatcaagaaacagtttttgttgtggtttgtttgtttgttttttgagatggagtcttgctctgtcacccaggctggagtccaatggcgcaatctcggctcactgcaacctccgcctcctgggttcaagcgattctccagcctcggcctcctgagtagctgggattacaggcgcccgccaccaagcccacctaatttttgtatttttagcagaggcggggtttcaccatattggtcaggctggtctcgaactcctgacctcaggtgatctgcccgcctctgcctcccaaagtgctgggattacaggggtgatccaccgtacctggtcaactcccagtcttaacacaaacagagcatataatgatggcagacaacattccagagagggctacaagggaagtaatattcaaatgggaaggccaggtttcattcatgcagaaagtagaaggaactttctaggaatgggctggcagtatagacaactttatctcacatagattccatagtcctctcacagaggactccccattctccttaacctcagctccccagtgctgctcggcttccctccgctgccagagctcctcaacttcttgtaccccaaaccctcagcctgaagccccagcaatctccactgttctccccaagctccctctgcccatctttctcttcacaatgacttcacccctcagaattcccatacttctttataggccccacattgaaacccagccgtttatttaaaataaaacaattgggccaagcatggtggctcatgcccataatcccagcaactcaggcagcccaggcaagaggattccttgaggccaggagtttgagaccagtctgggcaacatagtgagaccccatctctatgaagaaaaaaaaaatttttttttttttgagagagactcttgctctgtcgcccaggctggagcaatctcagctcactgcaaactcttggaaaacagtctggctgttctatgaattttaaacatacagttactatatgattcagccattccattcctaggtatatatccaagagaaatgaaaatatatatccacacaaaaacttgtttgcaaatgttcatcacagcattattcataatagccgaaaagtagaagcaacccaaatatccatcaaccaaagaatagataaaaacaatatggtggccaggcacagtggctcacgcctgtaatcccagctctttgggaggccgaggtgggggggatcactcgaggtcaggagttcgagaccagcctggccaacatggcgaaaccctgtctctactaaaaataccaaaaaaattagccgggcatggtggcaggcgcctgtaatcccagctacttgggaggctgaggcaagaaaactgcttgaacccgggaggtggaggttgcaatgagccgagatcgtgccattgcactccaatccagcctgggcaacaagagcaaaactaaaaaaatgaaaaaaccacaatatgctatatccagacaatggattattacgcagcaataaaaagaaatgaaatactaatacatgctacaacatgaatgaccctcaaaaaacattaaatgaaagaaaccagtcacaagaggccacatattggattgttccatttctataaagtgtgctgccccacccactcccatggccaattttagacctcaacaccagaattgtttgaattctgaaatttttaatttatgccttctgtgttctcaccatcctattattctggttttcattcattacccctagtacgcctgttgttctaccccattgagacaccacactttttatctcttctctttatagtctattgaccctctcccctctttgcttctcccatctagttcccatctggtctattgttttaatttctctcttgccagtattaactcccttgctcaattgtcttcctatctcgtccacctagaaagacctcaaccctccaattgtctatttattccatgcctgcctccggattcttgagtactatcgaagaaaatcatgcaaatattatattggtaccactaaatatggttttcaacctttattaagttatactctgtccaccttcttcaaaaccaccatttataactacattagattgttagggctgccataaaaaagtgccactatgtgggtggcttaaagcaatggaaatgtattgtttggtagttatggaggctggaagtctgaaatcaaggtgttgacagggccacgctctatctgtaggttccaggagaggaagcttccttgccttttctagcttctggagattgccaacaatccctggcatttcttaccttgcacctgcataactccaatctctgccactgttatcacatgacattctccctgggtgtctgtctctgtgtctcttctcttcctcttcttttttttttttttttttttttgagatggagtctcattgtgacacccaggctggagtgcaatggcgcgtctccactcactgcaacctccacctcccaggttcaagtgattctcctgcctcagcctcctgagtagctgggattaaaggcacccaccaccacgcctggctaatttttatatttttagtagagacggggtttcaccatgttgataaggctggtcttgaactcctgacctcatgatccacctgccttagcctcccaaagtgctgggattacaggcatgagccaccatgcccggccaatacgtatgaattctatctgctcctcgccaatctccactgcctccttcctaggtaagactaacgtcttctctcacctggactactacaactgacttgatcagcaagttatgttgatagagcatttcaggcagaaagaatagcacaattcaagaattggcttgaagattttgaggacaaaaggaaagccaagatcagtgtgactggaagataatgagtgagggttgcagtataaaagatgaggtctgaggcagggcgaggtggctcacgcctgtaatcccagcactttgggaggccgaggcgggtggatcacgagttcaggagatcgagaccatcctggctaacacagtgaaatcccatctctactaaaaacagaaaaaattagccgggcgtggtggtgggcgcctgtattcccagctactcgggaggctgaggcgggagaatggtgtgaacccgggaggcagagcttgcagtaagcgaagatcgtgccactgcactccagcctgggcaacagagcgagactccgtctcaaaaaaaaaaaaaaaaaaaaaaaagatgaggtctgagaggcaggcagagtccagattttgggggccttgaaggtccatgataaggagtttgcattttattttattttattttaagcaaagcagtgacatgttttaaaagggctctcttagctggtttacagagaatagattgtagatcatagcatagtttacttccagcatgctctttaggcttggcaagttgagatgttaatgcgaccccaattttggggcttgctctagcttgctttcactgtatatgaaactggaaagctatccaagttgttttcattttagcttcaaataaggaaacctcttttattctctgttaactgccaaggatcaagagtccctccctggaagaggtaaggtgatacattctttccctggagaaaaaactgttagaggaagccagaaagaagaagggaaggggggcagtgtcccaatcccattagattatgcaatcaagccgaaggtacccacctccattcaaataaagtgattgtgctttcctaaaacgaaaagccattgtctatcaagaatttatgctgatttacaaatttatctatgtgaaaatctttaggaaagttaaatatttaataaatcaccttttttttttttttgagatggagtctcactctgttgcccaggctgcagtgcaatggcgcgatctcggctcaccgcaacctctgcctccggggttcaagcaactctcctgcctcagcctcctgagtagttgggattacaggtgcctgccaccacccccggctaatttttgtatttttagtagagacaaggtttcaccacgttggccagactggtcttgatcagcaagttatgttgatagtgcatcctgacctcaggtgatccacccacctcggcctcccaaagtgctgggattacaagtgtgagccaccacgcccagccaatcaccttttttttttagagataaggtctccctctgtcacccatgctgagcacagtggcatgatcacaactcattgcagcctcaaactcccggctcaagtgatcctcccgcctcagcctcccaagtagctgggaccacgggcacataccactaggcccaggtaattatttttactttttgtagagatggggtcttgctctgttgcccaggctggtctcaaattcctggacatgagcgatcctcccacctgggcttctgaaaatgctgggattataggtgtgagccaccttgcccagccataaatcatggtttgttttttatttttttgagacagagtctcactccgtcacccaagctggagtgcagtggcatgatcccggctaactgcaacctccgcctttggtgttcaagagatcctcctgcctcagcttcctgagtagctggaattacaggtgcacactaccacacctggctaatttttgtatttttagtcgagacagggtttcaccatgttggccaggctggtctcaaactcctggcctcaagtgatccacctgactcggcctcccaaagtgttgggattacaggtgtgagccactgagcctggccaaatgacctttattaaaaagacaaattttatgctgaaactgttctagaactttcagaatatatatactctatgactacaggacaatatttgccaatgggatcagttatgatgtctgtttctctttgaggaacagtctatgccctttacctatcaattaacccagcagagggctggtttctgtgtcttattggcccccacacaaagttgttttctttgccccttagtgcagtgcagacaattctattaagaaaccattctattggccgggcgcggtgtttcatgcctgtaatcccagcactttgggaggctgaggctggcggtcacttgaggtcaggagtttgagaccagcctggctgatgtggtgaaacgctgtctctactaaaaatacaaaaattagccaggtgtggtgtcatgtgcctgtaatcccagctacttgggaggctaaggcatgagaatctcttgaacctgagagaagaaggttgcaatgagccaagatcacgccactgtactccagtctgggtgacagaacaagactctgtctcaaaaaaaaaaaaaaaaaaaaaaagaaaaagaaaaagaaacctttctatgaatcttattgttgtgtttattgtaataatgtaattgaagatatttgttacgttagttttcaagaatggctgtacaatttgctgagcaatgcttgattaactcagatgcaataacctgtgtaatagcctattttcttgctttgtattgattgctagacagcttaggtattgctcacctgtagcagatatagatcaatatgatccacattttagccccattcttggcttcattttgttcccttgttttcttttcctattgattcacatttgatttatcttgtcttgcattttacatatcttactaagactttaaaatcaattcttaaacatggcaaaataggaaggggtgaatgatattgaatatactgaaaccatttccaagcaggcattaaattctatccttttttgagacagagtctcactctgccgcccgggctggagtgcagtggcacgatctcagctcactgcagcctccactttccaggctcatgcctcagccccctgagtatctgggattacaggcctgtgccaccatgcccaactaatttttgttttcttagtagacacagggttttgccatgctggccaggtggtctcaaactcctggcctgaaatgatccatccgcctcaacctcccaaagtgctggacgggtagattgcttgagcttaggagttcaagaccagcctgggcaacatggcaagaccccgtctctacaaaaaagagataaataaattgttggccgtggtggtgcacagctgtggtcctggctactcaggaggctgagatgggaggattgcttgagcccaggaggcagaggttacggtgaaccaagattgcgctactgcactccagcctgggccacagagggagaccctgtctcaaaaaaaagtaaaaatatggccaggcacgttggcttacacttgtaatcccagcactttggaaggccaaggcagacggatcacctgaggtcaggagtttgagaccagcctggccaatgtggtgaaaccccgtctctactaaaaatacaaaaaaattagccaggcgtggtggcaggcgcctgcaatcccagctacttggaaggctgaggcaggagaatagcttgaacatgggaggcagaggtttcagggagccaagacggtgccattgcactccagcctgggcaacaagaacgaaactcaatctcgaaaaaataaaagaaaaagaaaaagaaaaaataatggaaattatttgtttgcattcctgtctctataactagactataaactcttttgaaggcagttattgttcattcattcaacaaatacaatggagtcacattatgtacccatttgacttacttgacttcttagggaaaacataaaaaaaagaagaaagaccaatactctatgattccacttatgtaaggtacctggagtagtcacgttcatagagacaaaaagtagaagggtggctgccaggggctgggaggaaagggaaatgggaagctgctcaaatgggtagagggtttcagttttgcaaaataaaaaagttccagagatctgttgcacagcaatgtgaatatagttaacagtataaagtatgcgcttcaaaatggctaagatggtgaattttgttatgtgtttattaccacaattttttaaaaaaagaaaaggaagaagaatcagctagcagtgcttgagatgagaacatgaatctgtgctgtttccacggctggtcttggttccttccttcatagagtatgcatctcactgggctgaatgtgattttattgtttaaagataaatgtttctggccaggtgcggtggctcacgcctgtaatcccagcactttgggaggctgaggcaggaggatcacctgaggtcaggagttcgagaccagcctgtccaacgtggtgaaaccctgtctctgctaaaaatacgaaaattagctgggcatgatggcgggcgcctgtaatctcagctacttaggaggctgaagcaagagaattgcttgaacctgggaggcagaggttgcagtgagcaaagatcacaccactgcactccgtcctgggcaacaagagcaaaactacaactcaaaaaaaaaaaaaaaaaggataaatgtttcttacaacatggcccctacatgcaaggcagctgcttacatgggccttaatcaaagaaactgttttcctattggaggggaaaaatggtcatactaaacttgttaagagaagagagagttaaaagaatcttcaaggatcatttttactatatgagtattaccatatagtaaaatatattatatatcaaaaatatattacgtatatcatggagttcctagtaccagtttttactactgttttctttcctcaccaactctcaagcgatatgtctaatctttgaggccctggctgttgggttttctctgttctccaagtcagcacctctcagaaggcaagtggacagcctcaagtgcccaaacctaagggacttggcagctcccagctgaagccatccttcacagagtcagtggaaccaatcatcaacatgatatgattttaaggatgggaagatatgtcctctgcaccttgcaaactcatgttattcgtttgctcatatagtccctatgctgaatatgtcttccttcaaccctgctatggcttgagtattttgagtgtgtcctccaaaagttcatgtgttggaaacttaatccccaataccatagcgttgggaggtgggccctaataagaacgcgattgggtcatgagggctgagtcactgggaattgattaatgttgtcatcacagaagcaggttagttattatgagtgggtttttgtttttttgttttgttttgttttgagatggagtctcactctgtcgcccaggctggagtgcagtggcatcatcttggcttactgcaacctctgcctcccgggttcaagcgattatcttgcctcagcctcctgagtagctgggattacaggtgcgcaccaccacgcccggctaatttttgtatttttagtagagaaagggtttctactaaactccatcagggctggtcttgaactcctgtcctcgtgatccgcccgccttggcctcccaaagtgctgagattacaggcgtaagccaccgcgcccagccaagagtgggttgttataaagcgaatccagccccggatgcctttctctgtttcacatgttcgcttccaccttctgccctttgcccatgggataaagcagcacaaggccctcactggataccagcaccacactctttaacttcccagcctccagaactgtgagctaaataaatgtctgttcatcacagattaaccattctgtagcattctgttacagcaacagaaaatcgatcaagacaaactccactcaagtttcattcagtcttcaggacccagctcagtcccttatcctccgtgaagccttcttaccattttctccattgttccactcacttgtcatgtgaacatttaattaccttctttctcttatttacctgagttaaactattatgtatttctcacataattctttatttctttctttacttttttttcttttttcagacacagggtctcactctgtcacctagcctggagtgctgtggcatgaccatggctcactgcagcctcaaactcctggctcaagtgatcctcctttctcagctgcccagatagctgggactacaggcgtgtaccaccaggcccagctatttcagagacagggtctcagtgtgttgcacaggctgtattctttttttcttttttgagacagagtctcactctgtcacccagactggagtgcagtggcatgatctcagctctctgcaacctctgcctcccgggttcaagcgatcctcatgcctcagcctcccacgtagctgggactacaggtgtgcaccaccacgcctggctaatttttgtgtttttagtagatatggggttttgccatattggccaggctggtctcgaactcctgacctcatgtgatccatccgccttggcctcccaaaatgctgggattacaggagtgagccacaactcccggcccaggctgtattcttttttttttttttttttttttgagacagactctcactctgttgcccaagctggagtgcagtggtgcgatctcggctcactgcaagctccgcctcccaggttcacgccattctcttgcctcaacctcctgagtagctgggactacacacgcctgccaccatgcccggctaattttttgtatttttagtagagacagggtttcactgtgttagccaggatggtctcaatctcctgaccttgtgatccgcccgcctcagcctcccaaagtgctggaattacaggcgttagccactgcgcccggctaggctatattctttacttcttttgttattatttaatatgtcatgtttgcaggccttgactcccccattatcaataaatacaggtaaagtttataggccagacattcttcaaaggactttttatgaacattatatataaccttcccaacagctccatgatataagaactattattgtctccatttgacatatgaggaaacttgaggaaagatagctgtggtgactttgcacaagttcacacagcaagaatgaggcatagctggagtttaatttcaggctgtctgacaccatagctcaaacctatgttcaatgtgcaggattggagggatctttagtgtttatctagtcaacttccctctcttgcactgctctttctcttcctctaaaccaagctcaaatcccttttccagtttcccaagtcgttatctaaactctttttttactttttgctttctatttttatttatttattttttttaagatggagtctcactctttcacccaggctggagtgcagtggcatgatctcggctcattgcaacctccacctctttggttcagcaattctcctgcctcagcctcccaagtagctgggattacaggtgtgcgccaccccatccagctaattttttttaatttttatcagaaacggggtttcatcatgttggccaggctagtctcgaactcctggcttcaagtgatccacctgccttggcctcccaaggtgctgggattacaggtgtgagccaccacacctggcctattttttatttttttgagacagggtctccctctgtttcccagcccaggctggagtgcagtggtgtgatctcagctcactacagtctcgacctctcaggctcaagcaatcctcccaccttagtctcctgagtagctgggactacagccacacaccaccatgcccagctaatttttaaatattttttagagacagagtctccctatatttcccaggttggtctcaaactcctgttctcaaggagtcctcccacctcagcctccctaagtgctgggattacagatgtgagccaccacacccacccctaagctcttcttgccatggagaacttagtattttgccttttccatctttagacttaaaaagctctcctttaaattcatctgacttctgcctaaggaggaatatagtatagtagctcatctgtacaatggagattatagtagctatctcccaggatggttgtaaggaatgaatgaagtcaggacaaaagcatttagctcagtgcctggcaccaggagctgctgaacacacagcagcaatgagctatcctttacttctctttacagatctgtgctttggagccacacaaaccaatcacttctcttttacccatggtagtccttcagtcttttttttttttttttttttaacatggagtcttgctctgtcacccaggctggagtgcagtggtgtgatctcagctcactgcaacctccgcctcctgggttcaagctattctcctgcctcagcttccggagtagctgggactaaggtgcatgccaccacgcccggctaatttttgtatttttagtagagacgggagtgttggccaggctggactcgaacttctgacctcatgatccgcctgcctcggcctcccaaagtgctgggattacagatgtgagccactacgcccggccagtccttcagtcttgaaagctgtgatcatttgctctaagttgtcatcactctgctcttcctcttcctccttttctttttttatctctatatctctagttccttcaactgaatctcacaaggcattgtttctaggccccttattattctgtcctcctctgcccctctcactgtggtcactgaacagagtgaaaccacaatttccttgggtttgtgctacgtgtctattaatgaagcccacaattgtattagcatttaggccgccgcattatattcagctagctccagccagctccattgagttcgtagccacctacagcaccatttcttccccatctgaaactgtgaaatcatgtttttttacattctatacctgtgcagttggtttcatgaattcagatggataatttgactgttttctctcttttattttatctcctctgattcagcctatcttatcctaacatcttttggaatctttatgtcttcttccatttatgcacagattttgaggacaggattgttgcaaggtaagagaattcctgtaaagcacaagtacgtggcatgcaataagtccttgataaacattaacaatggtgattgttattattatcctcagcacagcatctggcccatagttgactctcaataaatagtcactgattaatgaatgagtgactggatccatgattggtgaaatgaatgaatgttccctctcctgaatcctaggcccagtaaatttgatattatccttcttttacagataggaaaactgaggctcagagagcttaaggaacttccccaaagtagctcagctggagagtggtaaaaccaggactagaactcaggtctgcctgattcccaggcctgtgtgactaacacttccccactatactttcttacatctgtattcaggtcagaactagttgtggagtcagaagtctgaggggtttcccgagattgtatgttccatgccctagaaaagcgggttctcctgttgtgaccctgggagatgtggaggggccatgagatgggggacagagcactggaagcctcttctcttttctcccccatgggcctctcaattttcactgccttaaactctgcttagctgtttctcgcaagaaactaacagcgctgtgtgtccccaaggagaaacttttaagaccaaggagccaagacccagggaggtgattcaacagcttgccaggactgcagtcagtggagtcaagggcccagagagcagcagcaagaatggtataaagaacactgagggcccagcgcagtggctcatacctgtaatcccagcactttgggaaaccaaggtaggaggattgcttgaggccaggagttcaagagcagcctggcgaacatgatgaaaccccatctctactaaaaatacaaaaattagcctggcatggtggcactcgtctgtagtcccagctactcaggaggctgagacaggagaatctcttgaacccaggaggcagaggttgcagtgagtgagctgacattgtgccactgcactccagcctaggcgacagagggacactctgtctcaaaaaaaaaaaaaaaaagaagaacactgagggccaggtgcggtggctcatgcctgtaatccagcactttgggaggctaaggtaggaggatcgcttgaggctaggagttcaagaccagcctggataacacagtgagacctcatctcttaaaaaaaaaaaaagtttaaaagttagccagatgtggtggcacacacctgtggtcctggtacttgggaggctaaggtgaaagctgcagtgaggtgagctatgattgttccactgaattgcagcctgggcaacaaagcaagaaagaccctgtctttaaaaaaaaaaaaaagaagaagaagaagaatgcagacctgcaggaagctgtagttatcactctgcctctttggatatcagcttccgcatctgtaaaaagtgagggtggagagttcttgccttacctgcttcactacgcaaggcatggcaatgataacagctaacacatcctgagtgccacctctgtgcctgctcctgtgttgagtgcttctcatatccttgcagttagcaccatgaaataagcatattgttaaccctctttttttttttttttttttacaaatgaggaaaccaaggttcatggaattaagttacttgcccaaggcctctaactctaagtgacagaactgaaattttgaaagtgtgcagccttcagagctgagtgaccatgggtggagagtgtttgtgaactctcaagtatgatagatgccttgtaccctttggggcaagaatgaacagtaccagtttgcagcttgttatggttgcggttggaggtgggtggctgggggagagtgttttccaaggaggcagctgaacagatcctgtggttaggatgggtgacctgatcacatccccagagtctgggtgggaaaatgcaggagggtccacagtctgaaagagagccctagggcaggttgtggtggtagaggaaactcctagcgtgtcaatccaaacagtccactgggagcccaggccttcagtaggaggggcattgtggctcagatgacatgaacctctctgactgggctaaggcagagagaagctccagttcggtcagaactttccaagaaaccagggacacgcagcccaggaaataatacctgtgggagtcagccccacctgtgacccattcatcttatctatctgcccttgggtttctggccccccagtttctacactgctctccctggatccccagcccactccttggcttccccagcacctcccttccaggcccattctcccctcacacacaccacagctctgtctgccacggcagctcctttgtttacttccagagctgccaggcccaccactagccaaacacaacgaagcccagccagtgaggggaggctccaggctcagtctgtcccctcagagagaggtaatagcctccagaccaaggaggcagctcaaaggtaggctgcccccgcactgtgcccaagcttcaggcctagagggaaagggcacaaggtctgcccatagctgggtaggaatccctactgttgaagcagctttggtgaggagccccaggaatcaaagacccagctggagggaggtaggggaaatgttgaagccccctgggtgggaagtggaggcttagactgctcctggttctccctgtgtctattctgccaggtagaactggagtcctcagcccaaggcacccatatgcctgtctccccaccagagggctatgttcccctcccaaaagtctgtgccctgtgcctccccaaagattccagctgagaaaaggaagtgagcatttactctgggccaagccccaagcaggaaacattgtcagggtgtgcctggcatttgtctgtctgaggttagtggggagtttatttatctgatgtataattatgtatttatataatgtgtaatataaaggcaggggactccgattctgtttctggagctgggggctgatgggtg

SEQ ID NO: 487 - DNA, 20001 bp, Homo sapiens
agctaactgggtggatgaggtgggaggatcactcgcgtccaagagttcaaggttacaccgagctatgattgcaccactgcactccagcctgagcaacatagaagaaccttatctcaaaaaacaaacaaaaacaaaaatgaagaaactaaaaggaaaccagaaagaaagaaaatggagacatcacattggtcatagagaaatacaaaagtttagaaagaaatactatgaataattatatgtggacaatttagacaacctagatgaaatgggaaaattttagaaacacacaatctaccaaaactgacttaagaaggaagataaaattgtaatagacctgtaacaaataaagagattaaaatattaattatttttaaaaattccacaaagaaaagcccaggaccagatggttttactggtgaattcaaccaaaagcttgaagaactaacacaaagccttcacaaactcttccaaaaaatagaacaggaagaaatatttttcaactcatactatgaggccagaattactctgataccaaagacagaaaaagacattacaagaaaataaagttacaaagcaatatccttataaatatagatgtaaaaatcctcacaaaatattagcaaatcaaatccagccgcatattaaaaggatcatacaccttgaccaggtaggatttatcccaggagtacaaatgcagttcaacatacaaaaatcaatcaatgtagcataccatgttaataaaaagtcacatgatcatcctaatgcagagaaggcatttgacaaaatctaacatccttttacgataaaattactcagcagatgaagatgagaaaggaacttcctcaacttggcaaaaagcatctatgaaaaacctataactaacaccacacttcactcattgtgaaagatggagcatttcccccctaagatcaggaacaggacaagaatgttcattcacactacttctacttattagggcaattaggcaagaaaaaggaacaaggtggaatctagatcagaaagaaagaagtaaaaccatctctattcacagatgacattataggaattcttaaggaactcacttaaccattagagctaataaacaagttcaaggctgggcacagtggctcacacctgtaatcccagcactttgggaggctgaggcaggcagatcatgaggtcaggagtttgagaccggcctgtccaatatggtgaaaccccgtctctactaaaaatacaaaaattagctgggcgtggtggcgcatgcctgtagtcccagctactcgggaggtggagacaggagaatcactagagcccaggaggtggaggttgcagtgtgccaagattgtgccactgctctccagcctgggtgaccgactgagattccatctcaataaaataaaataagttcagcaaggttgcaggatacaagattaatacacaaaaatcagtagtatacatttgcaataaaggatcaaaaacaaaattaaaaccacacttccatttataatggcatcaaaaagaataaaatagttagaataaatttaaccaaagaaaagcaacacttcaacacagcaaactacaatgtgctgttgaaagaaattaaagaagtgccaccaagcaatctgacctgagaaaacatgcaggttcaacagaatgagtcctgctcttcagcaagcacccatcttgtgttcaagctgggtctatgaggcaagtttggcaacatagacaaggacatgcaaccaaatctgtaatgtagaaaaggccaagggaaggtggatcaatcattggaaacattcaacaatccatggaagaaatgttaaaaatagaatctcagggtctgatgaagttggaatatcactcttctatgtatttcggttggaatctgttgaatgattggataaagtaaaagataagtatagggaattattaggtagcattaaatgtgtaataaatgtaaagagagggagcaagtgcatacaaggaagtgtgcgctactgggtttctgttgaattgttcatggaagaccatcagcagttcaaatccaaaagcctgtcttaaaattagctgagtgtggtggcgtgtgcctgtaattccagctacttgggaggctgaggcaggagaatcacttgaacccaggaagcggcgattgcagtgagccaagatcgcaccactgtactccagcctggtgatagagcgatactccgactcaaaaaaaaaaaaaacttgtcttgagggactatgccaggctttacagctacaaacatcatggaggaagctgtctgcccattagaagcccagagcccggagggacagactagagcaaatcctctccctcgttggagctagatgggaacacaaatctatctgataactaacatgcaattttacatctcttaccttgtttaatcctcacaaccaccctgatgagtagtagtattatccccattttgtagatgaagaaacaagttcttcaaggggaagggatcctcagagtagcatatgaatgagaggcagaaccagagtcaggacctatatcttgtcttctccttcctaaaactagaaaagtacccacaaccaggcaatgcttttggtgcagaaaaagcagtagtgaacaaaataggcaaaaatgtctgcctttagtgctcacattgttgtggagaaagacaaacaataagcacagtagagaagtaaaaattagaatgttttgctaaaaagtccataaaattgaatattattcagccataagaagggatgaagtaccgttatatgctacaacatggatgaaccttgacaccattatgctaaatgaaagaagccagtcataaaaggtcacatatttcattattccatttgaatgaaatctccagaataggcagctacttcctatccacagaggtagaaagtagatgaatggtaaccaggggctaggggaagaggggaatggggagtgactctttattgggtacagagtttcttttttgggtgatgaaaatgatctagaattagataactgtgatggtgacaaaactttgttaatatactaaaaaccactgaattggctttaaaccaattgaattttaaagtatactttgaaagggtggatattatggtatgggaattatatctgataatgaaaatatgattacattgttcaaaagcatagggaagcagctacaaaaaatatgaatcataaattgtggctctttttattctgaagtgtagaaattgaatattatagctcaaaatataaaacaaaaacaaagaaagctaaaagcccttccatttggccatcttggagtaagacctaccacagtccagtgccttttactcagccccacagcctagcctattgtttacatgaaaccctgtagcttccactcctgtttggtgggtgtaaagttatgagtgaccatattgggggaagggaggaaaactccccataaacgtgtatcctgggggcctaaggagagacgatggcccaggtatcagaacatgatatgcctacttgtccctatctccttgtccacacataaggcttggaaggcagccatgttgtatatcacgtgatctccaaccaatgagctgattggcttcttcaacaagagcccaggtagagattggtgtctagaggagcccatcagattctagagaatcaggcctttggcagtggaaactcccctgggaggatgtcatagggtcctcagggtcagacacagagagaaggagacattgggacagagagaagaggcaagaaaaaaacatatcttgcagtctgtgaggaacagagtggcccccaggggcctccacctcaggttctggatcaaagctcctcaaagtttaaggtgcatttggatcacctgaggatcttatgaaaataaactctgtctgattcagtaggtctgggtttgggggtgggagcctgttagtatatttctaacaagctcccaggcaaggctgctactgctgctgatctaatgaccacagtttgaggctggacagagtggctcacacctgtaatcccaacactttgggaggacaaggcaggagggtctcttgagggtagaactttgagaccagcctgggcaacacagcaggacctcgtctctaaaaaacaagagagaagaagaaaaaggaaacaacaagaagactcaactagagtaggaagcagttaggccacatatctcttcaatggagaaaagagctttttcttgagtaaattggagtgtacccatgttccttgtcaatgatggtaactttaaatgtcaagaatgtgagagaggccaggggtggtggatcacacctataatcccagcactgtggggggctgaggtgggaggatcacttgagccaaggaattcgggagcaccctgggaaacaaagtgcgaccccgtctctacaaagtcaaaaaattagcccagactggtggcatgcgcatgtggtctgagctacatgggagggtgaggcagaaggattgtttgagcccaggttgaggctgcagtaagctaagtttgtaccactgcactcattccagcctgggcaacagcaagaccctgtctcgaaaaaaaaaaaaaaaaaagaatagtagagcccaggggaaggtgtggccctggggtaggcgctgggagactggagaacaactgttagtggtcccatcactgcccagagcagacagtgccctgtccaccctcatgagatctttgaactccttggacaggactggctataaatgaaaatgtggggacccttatttttaacttgttaagaatgttaagatggcaacagcaaagctttaaaccaagtgcatggcccttctgcgttgtaggcccacaaggccgacactgctattcacatccttgtatggtcccctaccctggagcgtggctggggcctgtgctctactgcttggaagcaaggcttatccctaagccttattttcgggaaggtggatttgagagctactatcccacatccttgcttggtgccctgtgaataaatcttttctcttttgcaaaactcgtgtcatggtgattaatttactgtgcaatgccaggcactgttggaaacctctggataggcctcacagggcctcagccatctcggggaggcgttagctagagtgtaacaaatatgaccccagcaactggggagggacagctcattccttcatgaggtgtggggctggcagccccgcaggcagtcagccacccttcctctctggcctccgtcctgggcactgggcccaggcactgggcaaggaggctgctgcacctcctttctcctcttcctttttttttattttttgagacggagtatggctctgccgcccaggctggagtgcagtggcgtgagctcggctcactgcaagctccgcctcccgggttcacgccattctcctgccccagcctcccgagtagctgggactacaggcgcccgccaccccgcccggctaattttttgtatttttagtagagacgggtttcaccgttttagccagtatggtctcgatctcctgacctcgtgatccgcccccctcggtatcccaaagtgctgggattacaggcgtgagccaccgcgcccagcctctcctcttcccttttagtgggaaatatacctgcagcctagattcccagaaaggggtggtgagagagcagacacgccactgattgacccgaagttctaggagccaagggatgagtgaagagggcgtggccggactcggggctcctggtgaggtgcaccgctgcaggctcggtgacccagcagttcctgcccaaccctcacctacccccagccgttcctgtccgccgcccccaaccagccattcctgcccgcagttcctgttcccgggcctgtccccgggtttgtccccagggcccgtcccctgggtttaggtctgccctcccacgccccaccccattgcccccgccatgggtctgctgtcccagccctgccgttcagtctacatcttcgccaagaatggcatccccttcgagcttcgcacagtggagctgaccaaagctgggctgggcaggcaggcccaggggatattggccgcggatccctgcctgtccccgctgctttgcagttgggccaagaatgcagactaacacgaagaatcagactctccggtgtggaaactattacataattatctatgttattatttttactttttggagacagcatctaactctgtcactcaggctggagtgcagtggcacaatcatggctcactgcagcctcgaccttccaggcttaagcgatcctcccgcctcagcccctcaagtagctgggactacaggtgcccaccgacatgcctggccaatttattattattattattattgagaggaggtcttgctgtgtttccgaggctggcctagaactcctgggctcaagtgatcctcttgccttggcctcccaaagtgttgggattacaagcatgagccgccatgccccactggttgtctattttaatagaggcttgatctttgcttgtgaatacaaaacattcttcaaaatacaggtttagagagggcacagcaggcacagaacgagggtagggaaatggagtggggcaagaatatcttcaccccatgtgcttggaaaaaacaatgaaactgcctcgttgtttcctaagtaaaatagtccctgtctacccctgcctgtgtctcttccacttttgtattatttgtttgtttatttatttatttatttatttatttatttatttatttatttattacagtgtctcaatctgcagcccaggctagagggcagtggcatgatcccggctcactgcagccttgacctctcaggatcaagtgatcctcccaacttactcctcctaagtagaatagttgggactacaggcacgtccccgtgcccagctacttttttctttggtgtgtgtagacgcatgattttgccatgtagaccaggctgaccttgaactcctgagctcaagtgatcctcctgcctcctccttctaaagtgttgagatcacagacatgcaccaccatgtctggccctgggtctcttccacttttatgtatttcttggcattcttctgccttttccttttcctgcatctgacttgctctatcccatggggcttctcacccagctgaaggggctactcctagaggctagaggctggagggccctgtggcagggcagtgggggaggccagcaccctcaccctgagctccagcgtttgctggtctggctggcatacagagatgcagctggagcacaattcagtggaggaggcagggctataactaagcagtagggcagagagcagagccagagccccctgggcaggccagagggaggaccctgctcagctgactcttcccaactgctgcccttggtacaaccagcttgagtcacctgctacagaacaggggctggacacagaagcagtctgtggagggagaatgggcaggggtgtgtatgtccattcagtagaagggcaaagaggcccacatgtaggcctatgatcagactggagcctggcttgactgaggtcctctgatccaaacaccaggcacctaatgcggcctctagcactggcctagagtgctaaagtgagtcagacctgggaacccccactggggagggagccttgagagtttggcataagaaagcaagaagagctgagccaccggaggctaagtagctgaatggggcagggattcccagcaagaatgaggttggtctgagggttgggaacatgtttggctgggactctggggtattgacaggtcacccagcctggccagtagggcctaagtccccagctgggataggaagctgaatcagagggggcaagcctagagcccagggaggaggctggaggggtctgacctatggatggaactggctgggggtggggtgtgaattacagctccagggaattgtccttgagccatgcttcaaggagctggacacaggaaagatggccctctgatggggtcaaggtctgtgacccagtgactagcagagaggcttcctcttccctgatgcctcccagataggggcctcagaaagctgctgctgggattttggggtgggggtgggcagagacctcagagaactctgggttatccccactcacctctctgatctttcctgcaggccagcagcacagcgatgcctttgcccaggtgaaccccctgaggaaggtgccgggccttgaaggatggggacttcaccttggctgagaggtaaccggtccgtgggctgctgccgggccttgtggggccagtcggctgtctgttcactgttgatggcttggatcatggactgtgggccctgcaccagccccagggtgaagaatgggtggaggcaggcagaggtgcccagtgttgacaagggttatagaagtcccctcctgcattgtacaagtgaggaaactgaggctggaggaggggagggacttgcacaaggccacagggcccagtctgcttccgggcctcctcaccgccagccttcccctccgaaaaaaggagagtgctaagtttcgaggagcggctgtaccaggcatcttagtgctaccattttgcccacaaatcctgtggggcaagtgctgtttccctggagagtcgagggaccactcagcgagcttcagtggctatttgctaaacatccaccagggccagaccccatttaagccctggggcttgagcagtgaacgtgtctgcgtccttctcctcatggatctcacattccattaatagaagggggagctgacagtaacccatgtaaacatggaacatatcggatgttgatggatgccatggaaaaaataaacagggtaagagtgggggtgtgtgtcattatgagtaggatgctgagggaagactccctggaggaggtggcatctgagcagggagctgtaggaatgtgcaaggcatgaggagaagggtgttctcactggagggaagagtgagggcgaaggctccaggtgggacaatgcatggggttcagactggagagcaacgggccagggtgggtgcagtgagcaggaagagcaggaggtcacgacagaggggagcatgggacactgggaaggctttggctcttaccgcaggtggattgagttgttggagagttttgagcagaggagaactgtgatctgacttacgtcgtaaaggatccccctggcaggggtgagaaagccactgcagtcatctggcatgcagcgctggagccccagaccaaggtggtggtggtgcagggttgcgggggattgtggtcagttctgacttttattgaaatctaactgcagggtttgctgaagggttggaggtgggtgggaaaaatgaaagccaaaaccagcctccaggttggtggccgcatggtggcgtcctttaccgaggccacatagtgcctccttggtggagctggattcacattcagagcctgggatcactggatggtccaacacccataaaggcatgatgagctctgagggtcagactgcacaacccttcaccataggtgaacgggagttgggacagggtgggaagcaatgctgccatgtcacctggaaggctctgtccctgctggccttgctcctggccctgtccacactttggatatgttggggagatatccaacatgctctcgttcttcagactcacactgggtgccccttcctcctggaagccttccctgagcccctgctgaagttcatgacattttgtttcttccttgctgcccttagttgagatgacagtctggccccgtgtagggctgtgtgaccctgggtagttacctaacctctctgagcctcacatccctcctctgcatcatggggatagtgaaaatgccccagaaaacggttgaagagtgttcagggcatgtcttctgcccctgccatgtccccccagtgtggctagcttgctctatatgagctgcatgtacaaagcacctgaccactggtacctccaggacctgcaggcccgcgcccatggggatcagtacctgtcatggcagcacatggccctgcagagtagctgctgctgggccatgtggcagacggtgagccatggagggcagggacacctcccgggatgcccaagggatgctgctttcactttacaaaattctgtttagacctgagaccaaatcctggaatgccagagactgcctaattcacccaacttgtttcataggagggaaaccaaggaccagagccaaggaaggattcccctaatgtgccttaattccacagctaccacctgcacacttacactcacacactgttcgacacacagccacactcacacacacatccacccacgtccacccacagtcacacgatgtatcacattcacacgtatacacccacacacacaatcataacatttacacacagtcacacagttaactcctatacacacatatacacccacacaatcacacaactcactcatattcaacaaagtcacacaactcactcacattgacacacatacacaccaaccccacacacaattcacatacatacacacacatatacacccacatacacaaccacaccattcactgacattaatacaaagtcatcacacagttcactcccacacacacacatacacctcacacacacaggcacacaattcacaccaacaaaatcacacagttcactcattcacacacatacacccacatacacaaattcacactgctcagtcacatttacacaccattcaaattcacacacatatacacctacatacacacagttcactcacatcacacacatatacacccacatacacacagttcactcacatcacacacatatacacccacacataaacacagtcacacaattcactcacgttcacacacacagttcactgacattcgcacacatacacacacaccacacacaggcaattcagtcacatggccgaaagccagtccttaccttcctatagttcctttcccagtgtcacctcagcctttggccctcagcgtccccttcccatgcctggactgcggaagagccctgaacacaccccatcttcatgcctccagcgctagcccgagcccttccctctgccaagagcactaagtgcaactcaagatcacttctagggacccttccctgcccctgctgccaggtgacctgaggatcctgctggtcccgcttgacaatgatgcacagcatggttagttcagctgaggtcgctctcccagacttactgccacctacacagcactaggactgactgtttaactttattctttatttcgtgtactttattggagtgtctgttgaaagcaaaaccatccaataaggaacaatcccaaggcagccagcatggatcaagaaggcacaggctgtggccgccatccccagtgcctgatggggagagggggtggtaatggaaaaggcccaggaaagcaggccagagtgtccctcaaaatatgagaaatcactggaagagagagccagaatgggacctaagacagaagccaccaccaggcacccttaaggcaggacagttgcaatggttacttggaatacttccggctaggagtggtgttgcgggaagtcagggaccccaaacagagggaccggctgaagccatgacagaaaaacgtggattgtgaagattttatggacatttattagttccccaaattaatacttttataatttcttatacctgtctttactgcaatctctaaacataaattgtaaagatttcatggacacttatcacttccccaatcaataccgttgtgatttcctatgcctgtctttactttaatctcttaatcctgtcaaccaaggaggatgtatatggcctcaggaccctgtaataattgcattaactgcacacattgtacaggatgtgtgtttgagcaatatgaaatgtgggcaccttgaaaaaagaacaggataacagcaattgttcagggaataagagagataaccttaaactctgactgctggtgagccaggcggaacagagccacatttctcttctttcaaaagcaaataggagaaatatcgctgaattctttttctcagcatggaacgtccctgagaaagagaatacgcaccaggaggtatcagcttataaacagcacccctgggcgtggcctgtctcttatggtcgagactgcagagatgaaatatactccagtctcccatagcactcccaggcttattaggaagaggaaattcccacctaataaattttggtcagaccagttggtctcaaaaccctgtctcctgataagatgttatcaatgacaatggtgcccgaaacttcattagcaattttaattttgcctcggtcctgtggtcctgtgatcttgccctgcctccacttgccttgtgatattctattaccctcttaagtacttgatgtctgtcactcacacctgttcgcacactccctccccttttgaaaatccctaataaaaacttgctggtttttgtggcttgtggggcatcacggatcctaccaacgtgtgacgtctcccccggatgcccagctttacaatttctctcttttgtactctctccctttatttctcaagccggctgacggttaggaaaaataggaaagaacctacgtgattattggggcaggtcccccgatagagtggcacatgatgggcacagggcaggcttgggaaatggggggccgtaaggccacaagacatgtgggcaggtagcccagagtgtgtctggaacatcctgtttattggtcggcagtgacatctactgtcacatttgagaactgcatccacagccacatgacctcctgtgaagacctcagggcaaactggggaaacctgcccttcttggaaggtgatactaggggggatgagcaacacctttcttggaggtttgaattcttcagggcccctccagcatcttggtcttcctaattcctcccttgatcccccagccctaggggtggtagcttcttgcagtgtttacctccgtgttaatctggattctctctgtcttcggagttctctaatgcctggttaccaattctttatatcaagttctctccgttaaaatcattgtggtggggtccatcccatggatatacatggaggtctgtgtgacaatgtataatcttactatttgcagttattacaaaactgtcctagaagacatgaatgcttgttaaaagaaatcttttaagtttcctagacttcaaagaccgttgctatgccctgtgaaacatcgcctatatcctttaacagtttgcaattcgaattggttacttacttaacattttgttgccctggtgatacaattatgttgactcgttattgtgaggttactttgttattaaccatgatgaggattactagcacatacttttactccatatgtataacacaacaatgtagtaaaaccaataactcttggttctctattcaaagtgtttggaatctttattctgtttaaaacactgatgacatttgccaatttttgagtgttcttcatgttactgatttgtaggagctctttatatattgcagatttagtctcttactggttatgtatgctgcacctgaggagtagcagcactgccaaggacactgagtgtcttgtctgtgcagagcttcacatgaagctggagagaagggactggggcaagagggaaagataaaaaggggcaagtaagtaacagaatgaatccttgttgctaatctcctggcccccatcccagacccttcaggggatcctggcgattcgaagcagcatagcctgataggcctctggtgagggtgttgggagggttttcttggccgcctgttccaggatgctcaagatgatgctgtgggcctcctggcatagctcagcacccaggaaagcctccactcgtccacgccatgctgccagtcgtggccgtccctcaaacagttcatagccgagagccaccggctgtagggacaaggatgaaaaagttgtgggcatacaactttcccagttgtcactgccgacccgaatgctggaaccatgggcagaagtatcagagacatggtccattccccagcccctaagtgaatggaccacaggggcccaggcagtatgttcagccttagagcccaagagcagccagggtgagaccccacacccaggcaggaggcagaagttcagggttctggccccagatcatccagagacttgctctatgattctgggcaaagttctggctttctccaggcctcagtgtttctgtctgcctcatgggtgtgacacgaagagggacactgcccacaggctgagctcacacctgcatcagctcctccagggccatgagatcagccagtgtcacctgctggccagcgaggaagggcctgtcccccaggaacttgtcctccagccattgcagggcctggtccatggcagtcctgttgcgttccaccttctcctcgggcacctggaccccaatgaggggccccaacacctgatgggggcagagagtgggtcagtctatggccccggcctactgccaactactccctgatggccaatcactctccagatggctctcctcacctggacccacaggggtataccaaaggtgccacggatgcagtcggcatgccagcccaggtactcatgaacacgggcacgagcctgcaggtcagatggataccagtggtccggcgtctggtacttacagctcaggtaaatcaggatggccgagctgggaacaaatgggcagtggctataaggacactggcaccaggcatttacccctaactgctcccatctgccagtggggcccgggggcttctctgcatttgaaggactgccctccagcctcgccctccatctccagctccccaacaccaccccctcctcctacgagtctcctcctgtctttgttgccttgggcaccgactcttggctggaccttctgctttgcattttgagaacctcatctctgtgatatgccagcagccgccctgtgaggtagacactcctgttagccttttagcacaagagaaaactcaaggtcagaatggtcaagtgacttgtccgaggcggtgcagctcagaataggctccctggacccctggaaccctgcatggggctggcacacagtggatgctccgtggagtcccttgcatgtccacgcgcttgggtcagggatcacgaggggaggaatgtctttggcccccgtctgacaggcccccagccatcacttctgcagccacctgacctcttgtccttttcctgcccagcagctggacctcaccatgagctgtgcccttgggccatggcattggcctctaggcccggcctgggtagattgggtagtctgcgacaagtcactagaggctcttttcagctagcatttgttgaacaaatgcgcaacagtggaaaaatgttcccttgtcttctcttctaatacccttcagtctgggagtggagaggccctgcggctcagaaaaggctggaagatgagaggtggggggacatgttctgtcagcccctgctcatcccggtcacaccccaagctgtaccttctccccagatacctctcctttctttctttcctttttttttgagacggagtctccctctgtcgcccaggctggagtgggctccctctgtcacccaggctggagtgcagtggtgctatctctgctcattgcaagctccgcctcctgggttcacgccattctcctgcctcagcctccccagtagctgggactacaggcggccgccaccacgccctgctaatgttttgtatttttagtagagacagggtttcaccgtgttacccaggatggtctcgatctcctgacctcgtgatccgcccacctcggcctcccaaagtgctgggattacaggcgtaaaccaccgcgcccggcctttttgagacggagtctagctctgtcgcccaggctggagtgcagtggcgcgatctcagcacactgcaagctccgcctcctgggttcacaccattctcctgcctcagcctccagagtagctgggactacaggcgcccgccaccacgcccggttaactttttttccatttttagtagagacggtgtttcacggtgttagccaggatggtctcggtctcctgacctcgtgatccgcccgccttggcctcccgaagtgccgggatgacaggcgtgagccaccgcgcccggccagatccctcgcctttcccctccctcgctgccccatggggtatgggagggccactggggcccggggccagtggggagagccaaggtcacatgggctccggatgcggtgaggggtgagggaaggagggcacctttcagtcaagatgaaatcaccatccttgagcgtcggcagtttccccaggctgttgatctgcaagaactccttgctcttgtgctgccctgaagaggaagaagtcagaaaaggtcttcagaataaaaacgctgcacctctacaccctccctcctcctccccaagcggagccccacagccctgagaaacagcaaggtctgggactagaggcctggatcagcctcactccctggctgggcctccctgccctgccacattccggggcagctggggggttttggtgggtggggccaggtgcagcaggtggataaagagaagttttctagccggactctggtgggccaggggaggggaggcaaactggggtggctcatctcttcccatctcttaattctcacaacagtatgtccttcttcccgaggtcttctgggctttgtgaatttatatgcgtgcattccacgcaagaactctgtcaactccattcagtattttctttccatccctacagagcagaaggtaacgttatcctccttttcagaaggcaagctaaggttcagagaggctgtgatcccttcaaggccactcagtccacagcattctctggtggcagacgctgcaggaggaggtgagggggctgtgcgggcggcgagacgctcagggcagagcagggcgggggcctgggggtgcactgggtttgtggacacgcggggaaacgggctgggcccacctttgaccaaatccacggtgcgcagctctaaggggatgccattcttcttggcgaagatgtagacggcgcggctgggctgggacaccaggtcaagaaacagctctaggcccatggcgggggcggcaaggacagcggggatggcagtgaaggcgctgagcgcggtgtgggcagcagctgtggcaggatcccggcgcgccgggaaataggggatcaggccccaccccctggggacagcacccaattggagcgcaccacccccggacccgcctcgccccttcggttcctgtccagtcctgccggccaagactccaccaccagatccgtgcgtccctacagggagggcggtcgctatgaacgcacagctgggagggtggagttggagctggggaccctcgactggcagggaggacgcggatgcagggggccgactgcaaggggaaggggaaccggctggacagggagaagcaggtctgcttttcgggatcccggtgccagggaccctgcccagttccaggcgtcgccctgacccagaaacgactgggcgccgccgtcctggaaaggccccagcgcacggacatctgagggttcgttcagagctctgtttctcggcgctgcatggtggcggaagggagggagcgaatgggatcccctaaaagggatcttagagtttcacccagtgggatgtgacacttgcaggtgtcccaaactggtgggaaccttgactggaaggctggggttaaggatgaactttctgccgtccagactgtcccctgcagagcagctgctgccagacagcgggagctgccagacagcgggagctcccacttcgtgcacaggatgggggcagggagcccgcagccgcgggaggcaggaatgactgtccgggaacctcctttcttctccctgaatcccagccctggcatctcaccagggggcacagtgatggtccagggctgggcccgggactctagctgaatctttcagagtatcccatccctctggccagtggcccaagcgagtgaaccagaatgcttccttgggagttttgaaactggaactggagagaggagctccctatggggaggtaaacgggagctggggccacctgtagtgacatttcctgagttcgaggagtagacgagactgagagagaaaagctgactcagagaaagggagtgataacagggcatgctggcccacacctgcaatcccagttactctcacgggatctgtttctctgatgtctgggtatgaaaggactttctaagcctcagaacagtgggagaactcaacaaagaaaaaaccaatacatatacaaggttactttgtggaggaaaaaatggattaaccttaagcaaaaaactgggaaggatctcggtaaaagatacgtcagaaggaagtaatgtcctttaagatgttcttagaaacccatcagacaggtggggtgtggtggttcacgcctgtaatccctgtactttgggaggcagagatgggcggatcagttgaggtcaggagtttgagaccagcctgggcaacacggtgaagccccgtctctactaaaaatacaaaaattagctgggtgcggtggcacactcgggaggctgagacaggagaatcacttgaaccttggaggcagaggtttcagtgagctgagatcataccactgcactccagccgggccactgagcgagactgtctcaaaacaaacaaacgaacaaacaaaaagaagagaaactcatcagacgaagacacaggaaaaaaatgagcgaaggaaatcagcagaggtttcattgaaggacaaagagaaatggtcaatacatggatgaaaacatgtttaacttcagtaataatcaaggaagcacacaccaacacaacatgcacatactgtttttatttatcaaaggcacacatatttttgaaatgagtactcctaattaatatgtacagagcacttacccagtgcccagcacaggggtggcaccctgtgtgtgagacagcatgaaacaggtagacacgcgccctgctgaaagtaagggaccgcctctctggaggatccatcgggcaataaggaggtttccacaccttaactgtgtctgccttgacctctggggcctgggagcagagccccctccagctggtggggaaggaagcgtggtgtgtttgaggacagaatggagagaagttgagtagagcaagtgtagactcttcctatccaaagtgtggtcaatggactgggagtatcagcatcaccagggagcttgttggaaatgcagaggctcaggccccactctgaccttactgattgggagcataaactgtaaccagattccagggaggattcatacacacattcccgtttgataagtggggggtagtaggaggtgaggtgaaaagtggggaggggatggctaccgcactggagaaggctggctttgtgttgaggcctttctcatgagggcagtggggagccatggaaggctttatgcaagagagggtacgggcagattgagattacagaaggatcccactggttgccttgtgtgaggacccagggagaagggggaggctgtccctgtttgagtaggagatgagagctactggtggctatgagtggaaagaagtgagcagaggtgagcagaaatcccaaggactggtgatgataggatgatggtgggaaccaggatgggctttgggcagaccctgacccctctctctgcctgtcggcccaccagataataatccctgtgttcctgggcgagtcagtgccacccgagatgttggcggccactttggctgagctggacggatgcctgcagctgctcgaggacaagttcctgcgggaccaggccttccttactgggccccgtatctctgtggctggcttggtggcaatcacggagctgaggcatgagagtgccatggggtgcggtggcccgctgggcagtggtgtatccgggaagggagctgac

SEQ ID NO: 488 - DNA, 20001 bp, Homo sapiens
gagaacatgcggtgtttggttttctgtttttgtgttagtttgctgagaataatggtttccagctttatcagtgtccctccaaaggacgtgaactcatcctttttaatggctgcatagtgatccatggtgtatatgtgccacattttctttatccagtctatcattgatgggcatttgggttggttccaagactttgctattgtgaacagtgctgcaataaacatacatgtgcatgtgtctttatagaagaatcatttaaaatcctttgggtatatacccagtaatgggatggctgggtcaaatggtatttctggttctatatccttgaggaatcgccacactgtcttccaaaatgctgaattaatttacactcccaccaacagtgtgaaagtattcctatttctccacatcctctccagcatctgttgtttcctgactttttaatgattgtcattctaactgtcatgagatggtatctcattgtggttttgatttgcatttctctaatgaccagtggtgatgagaattttttcatatatcttttggctgcataaatgtcttcttttgagaattgtctgttcatatccttcacccactttttgatggggttttttgttttttttcttgtaaatttgtttaagttctttgtagattctagatattatcactttggatggatagattgcaaaaattctggatggatagattgcaaaaattttctcctattctgtagtttgtctgtttactctgatgatagtttcttttgctgtgcagaagatcttcagcttaattagatcccatttgcctattttgactttttgtttaccattgcttttggtgtctcagtcatgaagtctttgcccatgcctatggcctgaatgctattgcctaggttttcttctagggtttttatggttttacgtcttatgttaaaatctttaatccatcttgagttaatttttgtatcaggtgtaaagaagggatccagttttagctttctgcatatggctagccagttttcctgacaccatttattaaatagggaaccctttccctattgcttttgtccagtttgtcaaagatcagatggttgtagatgtgtggtgttatttatgagggctctgttctgttcctttggtctatatatctgctttggtaccagtaccatgctgttttgcttaccatagccttgtaatatagtttgaagtcaggtattgtgatgcctccaatgttgttctttttgcttaggattgtcttgtctatgcaggatcttttttggttctgtatgaaatttaaggtagttttttccaattctgtgaataaagtcaatggtagcttgatggggatagcattgaatctataaattactttgggcagtatgaccattgtcacaatattgattgttcctatttatgagcatggaatatttttccatttgtttgtgtcctctcttatttccttgagcagtggtttgtagttctccttgaagaggtccttcacatcccttataagttgtattcccaggtattttattctctttgtagcaactgtgaatgggagttcactcatgatttggctctctgtctgttattggtatatagaaatgcttctgatttttgcacatcaattttgtatcctgagactttgctgaagttgtttatcagcttaaggagattttgggctgagatgatggggttttctaaatatacaatgatgtcatctgtaaacagagacaatttgacttcctcttttccaaattgaataccctttctttctttctcttgcctgatagtcctagccagaacttccaataccatgttgaataggagttgtgagagagggcatccttgtctttgccagttttcaaagggaatgtttccagtttttgttcattcagtatgatattagctgtgggtttctcataaatagatcttattgttttgagatacattccatcaatacctagtttgttgagagtttttagcatgaagggctgttgaattttgacgaatgccttttctgcatcaattgagataatcatgtggtttttgtcactggttctgtttatgtgattgattacatttattgatttgcatatgttgaatgagccttgcatcccagggatgaagccgacttggtcgtggtggataagctttttgatgtgctgatggattcattttgccagtattttattgaggattttcgcatcaatgttcatcagggatattagcctaaaattttcttctttggttgtgtctttgccaggttttggtatcaggatgatgctgtcctcataaaatgagttagggaggagtccctctttttctattgtttggagtagtttcagaaggaatggtacaagctcctcatacctctggtagaatcaggctgtgaatccgtctggtcccggcctttttttggttggtaggctattcatttttgcctcattttcagaactagttattggtctattcagggattcgacttcctggtttagacttgggagggtgtatgtgtccaggaatttatccatttctctagtttatttgcatagaggtgtttatagtattctctgatagtagtttgtatttctgtgggatcagcagtgatatcccctttatcattttttattacgtctatttgattcttctctctttgcttctttattagtctgtctagtggtctttcaattttgttgatattttcaaaaaaccagctcctggattcattaattttttgaagtattttttgtgtctctgtctccttcagttccctgtgatcttagttatttcttgtcttctgctagcttttgaattggtttgctcttccttctttagttctttttgttgtgttgttagggtaccaattttttgtatttcctgctttctcttgtgggcatttagtgctataaattttcttctacacactgctttaaatgtgtcccagagattctcataggttgtgtctttcttctcattggtttcaaataacttatttatttctgccttcatttaattatttacccaggagtcattcaggagcaggttgttcagtttccatgtacttgtgtggttttgagtgagtttctaaatccttagttctaatttgtttgcactgtggtctgagagactgttatgatttccattcttttgcatttgttgaggaatgttttacttccaattatgtggtcaattttagaataagtgtgatgtggtgctgagaagaatgtatattctcttgatttggggtggagagttctgtagatgcctattaggactgcttggtccagagctgagttcaagccctggatatccttgttaattttctgtcttgttgatctgtctagtgttgacagttgtgtgttaaattctcccattattattgtgtgggagtccaagtctctttgtaggtctctaagaacttgctttatgaatctgggtgctcttgtattgggtgcatatatacttagcatagttagctcttcttgttgcattgatcccattaccgttatgtaatgcccttctttgtctcttttgagctttgttggtttaaagtctattttatcagagacaaggattgcaacctctgcttttttttttttttttttttttttgctttccatccctttttttccctccatccctttattttgagcctatctgtgtctttgcatgagagatgggtctcctgaatacagcacactgatgggtcttgactctttatccaacttgccagtctgtatcttttaattggggcatttagcccattttcttttaagtttaatattgttatgtgtgaatttgatgctgtcattatgatgctagctcattattttccccattagttgatcgctttcttcatagtgttgatggtctttacaatttggtatgttttagcagtggctggtaccagtcattcttttccatgtttattgcttccttcaggagttcttgtaaggcaggcctggtgttgacaaaatctctcagcatttgcttggctgtaaaggactttatttctccttcacttatgaagcttaagttggctggatatgaaattctgggttgaaaattcttttctttaacaatgttgaatattggccccgactctcttctggcttgtagggtttctgcagagaaatctgctattagtctgatgggcttccctttgtgggcaacctgacctttctctcttgctgcccttaacattttttccttcatttcaactttgatgaatctgatgattatgtgtcttgggttgctcttcttgagaaatatctttgttgtgttctctgtatttcttgaatttgaatgttggcctgccttgctaggttggggaagttctcctgaagagtgttttccaacttggttccattctccccatcaaacatatatttggtacaccaatcaaacgtatatttggtcttttcatatagtcccatatttcttggaggctttgttcacttcttctcactgtttttttctctaatcttgtcttctccttttatttcattgagtttatcttcaatctcttatatcctttcttccacttgatcgatttgggtattaatacttgtgtatgcttcacaaagttcttgtgctgtgcttttcagctccataagatcatatatattcttctctaaactggttatactagttagcaattcctctaaccttttttcaagcatcttagcttccttgcattgggttagaatatactcctttagctcagaggagtttgttattacccaccttctaaagcctatttctgtcaattcatcaaactcattatctgtcccattttgttcccttgctggagaggagttgtgatcccctggaggagaagaggcgttctggtttttggagttttcagcttttttatgctggtttctccccatcttcatggatttatctacctttggtctttgatgttggtgagcttcagatggggttactgaatagacatcctttttgttgatgttgctactaatcctttctgattgttagttttccttctaacaggcctctcttctgcaggtctgctggagtatgctggaggtccacttcagaacctatttgcctaggtatcaccagtggaggctgcagaatagcaaagattgctgtctgttccttcctctggaagcttcatcccagaggggcacttggcagatgccggcaagagctttcctgtatgaggtgtctgtcggcccctactgggggttgtctcccagtcaggatacatgggggtcagggacccacttgaggaggcagcttgtcccttatcagagctcaaacgctgtgctgggagagccactgctctcttaagagctgtcaggcagggacgtttaggtctgcttaagctgccccacagccaccccttcccccaggtgctctgtcccagggagatgggggttttatctatatgttccttactggggttgctgcctttttttcagagatgccctgcccggagaggagaaaatctagagaggctgtctggccacagtggccttactgagctgcagtgggctccatccattttgaagttctaggagcctttgtttacactgtgagggtaaaaccgcctactcaagtctcagcaaaggtggacgcccctcctcccaccaagctcgagcatcccaggtcaatctcagactgctgctgtgctggcagcaagaatttcaagccagtgaatcttagcttgatgggctccatgggggtggcacccaccaagccaggcaccggagaggatctcatggtttgctggttgcaaagactgtgggaaaagcatagtatctgggctggagtgcactgttgctcccagcaccgtctcttacagcttcccttggctaggaaagtgaaatcccctgatcccttgtgctttctgggtgaggtgatgtccccaccctgctttggctcaccctccatgggctgcacccactgtccaaccagtcccaatgagatgaactgggtacctcagttggaaatgcagaaatcacctgagttctgcatcgatctcactgggagctacagaccagagctgttcctattcagccatcttgccagcacctcttctagaacttttatggtttcagatcttagatttaagtcttcaatccatcttgagttgatttttgtataagatgagcgaagaggatccagcttcattattctacacgaggcttgccaattatcccagtatcatttggtgaatagggtgtcctttccccactttatgtttttgtttgcttttttgaagatcaattgacagtaagtatttgggtttatttctgggttcccaattctgttccattggtctatatgcctatttatgtaccaataccattctgttttggtgactatggccttacagtatagttttaagttgggcaatgtaatgcttccagatttgttctttttccttattcttgctttggctatgtaggctcttttttggttccatatgaattttaggatttttttttctaactctgtgaagaatgatggtggtatttttataagaattgttttgaatttgtagattgcttttggcagtatggtcatttttacaatattgattctactcattcatgagcatgggatgtgtttccatttgtttgtgtcatctatgattttgttcagcagtgttttgtagttttccttgtagaggttttttgtttttgtttttttttacctcctttgttaagtacatttctaagtattttcttttgtgtatttatttttattttttgcagctgttgtaaaggggttgagttctcgatttcattcaaaccttggtcactgttggtatatagcagagctactgatttgtgtacatcaattttgtatcctgaaattttgctgaacttttaaaagaccttattggctagatttcagatggcttcaggctggttctaccatatggctctcctcaaacccacaagcaaagttcctacaccctttgcccagagaagctcagagcacagactgatccaaagctagccacagcaactctactggcaaagcagctaatgatcagacgccagtcctctaggggaaatcccatctcaaaatctccatggtcccgatgaagtgcttttcactagagatactcccaacaccctttccccttggtgaatggcagaaatcactacacagctttaccaaagaaattctcttcaccaaatcctgcaaaaatcctcaacagcctaattcttgtattaccctttttgaatgaaggtatttaagagctatgaaacttctctttcctttgaaaatttgtatcttcgtttggtaactcacattagaaatgcctattgattataccttgattcttcaactgaaacttccagtttcagaaagataaagatgataatacatattaccctaatttttttcttaaaaattttattggaacaatttttgttttcttgtgcctctggttaataagtaacagaaactttttgtttccttgacattgtgatgcaaggaaaaaatctcggaggaaagaaaggagataaatataggctacaaatcaataaaaacttattatttcaatgcagtagaagagtgggaaattgtatagggtcacgtctctgaggtattgttcatacagaatgttgcaaagagcatgtagctctttaattcaggctttctaaacacaagttttgaaagaaggaaggctttcttcttttcaatgtttaggtgcagaggctgtatggtggcaagtgaggaggaagcataatatctcctaattcgtaaattgtacttagttttgttgtttttaatttttgtgggcacatagtaggtgtatatatttgtggggtaaatgagatgttttgatacaggcatgcaatgtgaaaaaagcacatgaagaatggggtatccatcccctcaagcattaatccattgagctgcagacactccaactacactctaagatattttaaaatgtgcagttaagttattattgactatagtcaccttgttgtgctagcaaatactaggtcttattcattcttcctatttttatgtagccattaaccatcctcacctctcccccaggtccccactacccttcccagcctctggtaaccatccttctactctatatctatatctctatgagttcaattgttttgatttgtagatcccacaaataagtgagaacatgcaatgtttttctttctgtgcctggcttatttcacttaacataatgatctccaattccattcgtgttgttgcaaatgactcaatctcattcttttttgtggatgaatagtaaccccctgtgaatatgtaccagattttctttactcattcatctgttgatggatacttaggttgcttccaaatctcggctattgtaaataatgctgcaacaaacataggagtgcagatatctctttgatatactgctttccattcttttgggtatatacgcagcagtgggattactggatcacatggtagctcaatttttattgttttgagaaacctccaaactgctctccatagtggttgttaatttacattttcaccagcagggtatgaggtttcccttttccctgcatctttggcagtttttgttattgcctgtcttttggatacaacccattttaacttaggtaagatggtatttcattgtagttttgattttcatttctctgatgatcaataatgttgaacactttttaatatacctgtttgccatttgtatgtcttcttttgagaaacatctatttaaatcttttggagatcttttgatcagatcatttgatttattcctgtagagttgttagggtttcttatattccagtctttaatcctgtgtgagatggatagtttacaaatattttctcccatttagggaattgtctcttcactttgttgattgtatcctttgttgtacagaagcttttttccttgatgctatctcatttgcccattttttctttggttgcctgggttggtggggtaaccctgtgctcaatgtgctcaaaaaacttttgcccacatcaatgtcctggagattttccccaatgattgtttgtagtagtttcatgctgttaaggtcttagattgaagtctttaatctatttttatttgatttttgtatacagtaagagataggggtctagtctcattcttctgcatatagatatccagtttttcattactttatccagcaccatttattgaagaaaccgtattttccccagtgtatgttcttggcacctttgtcaaaaatgagttcattgtaggtgtgtggatttgtttctgggttctctattctgttccattcctctatatatatgtctgtttttatgccagtaccatgctgttttggttactatagctctgtagtataatttgaggtcaggtaatatgattcctcaagatttgttatttttgcttagcatagttttggctattctgagtctttgtggttccatataaattttagaattgttttctatatttctatgaagaatgtcattggtattttgatagggattatcttgaatctgtagattgctttgggttgtatgcacattttatcaatattgattcctccaattcatgaacatgaaattttttttttggtgtcctcttcaatttcccttatcagagttttatagtttttattacagagatctttcatttctttggttaattactaggtacttaattttatgtgtgactattgtaactgggatttctttatattactttttcagattgtttgctgttggcatctagaaatactacttatttttgtatgttgattttgtatcccacaacctaactgaatttgtttatcaattctaatagttttcttgtggagcctttcagtttttttaaatacaagatcatatcatctgcaaaaaggataataatttggcttcttcctttccaatttggatgccctttatatctttctgttgttggaatgctcgaggtaggacttccagtattaggttgaatatcactggtgaaagtgaacatccttgttgtgttccagatcttagaggaaaggctttccatttttccccactcattatgatactagctgtgggtatgtcatatacagtttttattatgttgaggtatgtttcttctatccccaattttttgagggttttcatcatgaatggatgttgaatttttaattaaagcttgattttgtcaaattctttttggattttgtcaaatttaaaaattcaaactgttttccatagtggttgacactcctccccagatgcccgtggtggtggcatggcgccgtatcctgcctgggctctggcctctgctctggcctccttcttgctctatctgccccgtttctgagaagcctagcggcttcttagtccggcccatctcttaatcagatgattagagtttatcctatagagttatttgtgctccttgtgtattctggtaattaatcccttctcagatgggtagtttgcaaatattttctcccattttatgggttattatttcactgtgttgattgtgtcctctgctgtacagaagctatttaacttgatgtgatctcatttatccatttttgctttggttgcctgtgcttgtgttgcactactcaagaaatttttgcctagaccaatgtcctggagatttttcccaatgttttcttgtggtagttttatagtttaaagtattagacttaagtctttaatctattttgatttgattttgtatacggcaagagataggggtctagtgtcattcttgtgcatagggatatccagtttttctggaaccatctattgaagagactgttttttccccagtgtgtgttctgggaacctttgtcaaaaatgagttaactgcaggtgtgtggatttgtatctgggttctctattccagtgaccctcaacctttttggtactagaaactgattttgtggaagacaatttttccatggaccggggtgggggtggaatggttttggaatgaaattgttccacctcagataatcaggcattagatagattctcctaaggagcacgcaacctagatcccttgcatgctcaattcacagtacggctcacactcctatgagaatctaatgccaccactgatctgataaaaggtggagctcaggcaggaatgctcacctgcctgcagctcacctcctgctgcatggcccagttcctaacaggccacagaccaatgccagtttatgacccgggagttaaagggctctctctgttatgctccattgctctatgtgtctgtttttatggcagtaccatgctgttgtgattactatagctttataatataatttgaaatcaggtaatgtgattcctcaagatttgttcattttgttgagagttttaatcataaagggatgctggattttgttgaatgatttttatgcatctattgagatgaccatgtaatttttgtttttaattctatttatgtggtgtatcgcatttattgatgttataatatatatgtggtgtatcacatttattggtatgtgttgatatatgttgatatttgctaatatatgtcgatatgtgttgatatatgtttatgtggtatatcacattatattgatattaatgttaaaccatccctgcgtacctggtataaaacccacttgatcgtggtggattatctttttgatatgtttttggattttgttagctagtattttgttaaggattttagcatctgtgttcatcagagatattggtctgtaattttcttcatcagagatattggtctgtaatgacctttcttggttttagcattagggtgatataggcttcactgaatgactcagggaaggctccctctttctttatcttgtggaatagtgtctatagaattggtaccaattcttctgtgagtgtctggtagaattctgctgtgactccatctggtcctggacttttctgtgttggtaacttttttatcacagtttcaatctcactgcttgttattggtctcttcatggtatctaattcttcctgatttaaactagaagtgtggtatctttccaggaatttatccacctcttctacgttttccagtttatacacataaaggtgcattggcatacaagggacacacctcaatataataaaagccatccatgacaaacccacagccattgtaatactgaatgtggaaaagttgaaatcattccccctgagaactagaacaagacaaggatgcccactctaaccactcctcttcaaaattgtactggaaatccaagccaaagcaatcccacaagagaaagaaataaggggcatccaaattggtaaagaggaagtcaaactgttgctgtttgctgatatgattgttaacctggaaaaccctaaagacttttccagaaagctcctagaactgataaattcagtagtttccagataaaaaattaatgtacacaaatcagtagctcttctatacactaagagtgacaaagctgagaaccaaatcaagaactcaaggtcttttacagtagctgcaaaaataaaataaaataaaataaaataccaaggaatatacctaaccaaggaggtgaaagatctctacaaagaaaactacaaaacactgctgaaaggaataatagatgacacaaacaaatggaaacacatcccatgctcatggatgcatagaatcaatattgtgaaaataaccatactgccaaaagcaatctacaaattcaatgcagttaccatcaaaataccaccatcattcctcacagaattagaaaaaaaatagaaaatttataggaaaccaaaaaagagccagcatagtcaaagcaagactaagcaaaaagaacaaatctggaggcatcacactacctgatttcaaattatactataaggccatggtcaccaaaacagcatggcactagtataaaaacagggacacagaccaatggaacagaatagaaaactcaagaataaatccaaatatttacagccaattgatctttgacaaaacaaacaaaaacataaagtggggaaaggacacccttttcaacaaatggtgcagggatcactgggaagccacatgtagaagaatgaaactagatcctcatctctcaccttatacaaaaatcaactcaagatgaattaaggacttaaatctaagacctgaaactataaaaattctagattataacattggaaaaacttttctagacattgacttaggcaaggaattcatgaccaagaatctaaaagcaaatgcaataaaaacaaagataaattgctgagacttagttaaactacaaagcttttgcacagcaaagggaacagtcagcagaacaaacagacaacccacagagtgggaaaaagtattcacaatctatacacctgacaaaggactaatgtccagaatctacaatgaactcaaacaaaccaacaagaaaaaaaaaaaaatccaaaagtgggctaaggaaattaatacacaattctcaaaagaagatatacaagtggctaatgaacatatgaaaaaatgatcaacatcactaatgatcagggaaatgcaaatcgaaaccacaatgtgataccaccttactcctgcaagaatggccataatcaaaaaatagtagatgttggcatgaatgcagtgaacagggaacacttctacactgctggtggacatgtaaactagtacagcccctattgaaaacagtgtggagattccttaaggaactaaaagtagaattaccatttgatccaacaatcccactactgggtacctacacagaggaaatgaagtcatacaaaaaagatacttgtatacacatgtttatagaagcacgattcacagttgtaaaaacgtggaaccaacccaaaagcccatcaatcaacgagtaaagaaattgtggagatatatatataaatatatacatatatgatggaatactactcagccacaaaaaggaattaatggcattcgcagtgaccagcatgagactggggactattattgtaagtgaagtaacttaggaatggaaaaccaaacataatatgttctcgcttataagtgggagctaagctataaggatgcaaaagaataagaatgacacaatggactttggggacgcaggaggaaagggtgggaaaggcgtgagggacaaaaaactacaaacagggtgcagtgtatacagctcgggtgatgcatgcaccaaagtctcacaaatcactgaagaacttactcatgtaaccaaacactacctgttccccaataacctatggaaaataaataaataaataaataaataaataaataaataaaagatttattctttttgcttaggatagctttggctattccgagtcttgtgtggtttcatataaactttaggattgttttctctatttctgtgcagaatattattaatattttgatagagattgcattgagtctgcagattgctttgagtagtatgaacattttaacaatattgattcttccaattcatgaacatgggatatcttcacattttttggtgtcctcttcaatttctttcatcagtgttttatagttttcattatagagatcgtttacttctttcattaattcctaggtatttaattttatgtgtggctattgtaattatgattactttttatttctttgtcagattgttcactgttggcatacagaaaggctacttttttttgtatgttgattttgtatcctgcaactttactaaattgcttatcagttctagtatgtttttggtggaatcttgaagtttttctaaatatgagatcatgttatctgcaaacaaggataatttgaattcttccttccaatttggatgccctttatttctttctcctgtctgattgctctagctaggactttcagtactatgttgaataatagtgggaaaaagtgggcatccttgtcatgttgcaaatcttagaggattggctttcaatttttctccattcagtatgatactagttgtgggtctgtcatatatgtcttttattatattgaggcatgttccttctatccccggtttttttaggttttttatcatgaaggatgttgaactttatcaaatgctttttcagtatcaattgaaatgacaaaatgatttttatccttcattctactgatatgatgtatcacattgattaagttgcacatgtagaatgatccttgcatcccagggataaattccacttggtcatgaagaatgatctttttaatatattgttgaattctatttgttggtattatgattcatatttttgcataaatattcatcagagatattggtcagtagttttctttttttgatatgtctttctctagttttggtatcagggtaatactggtcctgttgaatgagtttggaagtattttcttctctattttttggcacagtttaggtagaattggtattagttcttattcaaatgtctagtaaaattcaacagtgaagccatggtgtcccagtctgttccttggtaggagactttattatggctatgatctcattatttgttaatggtctgttcaggttttggatttcttcatggtccgatcctagtacttgtatgtgtctaggaatttgcccatttcctccaggtttttaaatttattggtctatagttgctcataggagccactaatgatcctttgaatttcttcagtatcagttgtaatgtctcttctttcatctctgattttatttatttaggccttctctggtttttttttcttagttaatctggctaaaaattcaccgattttgtttaagttttcaacaaacaatcttttggtgtcattgatcttttgtattattttcttatttaaattttatttatttccactataatctttactatttccttcattctactaattttaggtttggtttgctcttgcttttctagttcttgaagatgcatttttaaattgtttatttgaagtttgttctctttgctaatgtaggcacttatagctatcagcttctctcttactactgtttttgcagtattccagaggtttgggtatgatgtgtcattatcatttttttcaagaaatttttatatttccttcttaatttctcgatttacccactggtcattcaggaatatgttgtttaattttcatgtatttgaatagtttccaaaattcctctttttaatttctagttttattccactgtggtcagagaagacacttcatgttatttcaattttttgaatgttttaagacttgttttgtgacctaacacatgatacatgatgtatctttgagaatgatctgtgtgctgagaggagaatgtatattctgtagcttttggatgaaatgttctgtaaatatgtattagaatcacttgttctgtagtgcacattaagtctgatgcttcttagatgattttctgtctgtaaaatctgtccaatgctgaaagtagggtgttgaagtctccagctattattgtactggtacctgtgttagtctgttttcatgtgctgataaagacataccccagactgggtaatgtataaagaaaaagaggtttaatagactcacagctacacatggctggggaggggcctcacaatcatggcagaaggttaaaggcacattttatatggctgcagaaaagggagagaactagtgcagggaaactccccattataaaaccataagatctcataagacttattcactatattgagagcagcatgggaaagacctgcccccatgattcaattacctcccactgggtccctcccattacacatgggaattgtggaagctacaattcaagatgagatttgggtggggacacagtgaaactatatcagggtctgtctctctctttagcacgaataacatttgctttatataactaggcactccagtgttgggtgcatatatatttaaaattgttatatgctcttgctaaattgattcctttattattagagacattctttgtctctttttatagtttttgtcttgaaatctattttgtcttataaaagtatagctacttctgctcttttttggtttccattggcatagaatatatctttttccattttttttttcaatctatctgtgtttttataggtaaggtatggttcctgtaggcaacagatttatgggtcttgcatttttattcagccagtctatgtctaaatggaatgtttaatccatttatatttaatgttattactgataactgaggacttactcctccaattttgttacttgttttctggttgttttgtggtcttctcttccttatttctctccttcctgtcttcctttagtgaggctgatcttctctaatgatataatttagtttcttgcttttaatattttatgtatctgttgtatattatttggtttgaggttatcataaggcttgcaaatactattttataacctatcattttagcaaagagaaaagtaatgaaaactctacaatttatcttcaccaccccactttttaacttttcattatttctatttttattttattttactgtctatgtcttgaaaatttgttgtggttattggttttgattggttcattttttagtgtctctacttagcataagggtagtttatacaccacaattacagtgttatcatattctggggtgttttgtctacttcctatttccagtgagttttcttaggtaattatttttgctcattaacatcctttctttaagattgaaaaaatccctttagcatttcttgtaagacaggtctggtgttgataaaatccctcagcttttgactgcctgggaaagtcttcatttttccttcatattttaaggatattttccctggatatactattctaggggaagggtttttcttcagcaatttaaatatgtcatgccactctctcctggcctctaaggtttccactgaaaagtctgctaccagatgtatttgaacttcactctatattatttgttttttttttctcttgtttctcttaggatcctttctttatccctgacttttgggagtttgattattaaatgcatagaggtagtcttttgtgagtttaatctacttgatgttctataaccttcttgtacttaggtattgctatcttcctgtaggtttgggaagttctgtcactatgcctttgaatatactttctatatctatctctttctccacctcctcttaaaggccaataacttttagatttgcccatttgaggctattttctagaacctgtaggaatgcttcattgttttttatttttcatcttttgtccctctgactgtgtattttcaaatagcctgtcttgatgctcactaattctttctgctgcttgatcacgtctgctattaaaagactccaatgcattattcagtgtgtcaacaacatttttcagctccagaatttctgcttgattctttttggttatttcaatctcttagttaaatttgtctgattgaattctgaatttctcctttgtctttcctcaagacacttattttgaattgcatgtctgaaaggtcacataattctgtttctccaggactggtccctggtgccttatttagtttgtttgataaggtcatgttttcctgaattgttgtgacacctgagaatgtttgtctgtgtctgggcattggagagttaggtatttattgtagtcttcactgtcggggcttgtttattcccatccttctcaggaagacatttcagatatttgaaaggacttgggtgttgtgatctaagctgtgtctgctttatggggcaaaccaagcccagtaacactggttcttgcagacttgtaaagatacagccttgatggtcttgaatgaatatggaagaattacctggattactagacagagagaccgttgttcttttcccatactttctcccaaacaaacggagtttgtctctttgttctgagccacctagatctgggagtttagtgacacaagtgcccctgttcacaccactaagactgtgttgggtcagactagacaccagcacagcactggatcttgtccaagtcctgccacaaccattctctggttactgcctatgtttgctgaagggcctggggctctacaatcatcatatggtaaagccacccagtgctatgtccttcccttcagggtgccaagttttcctaggccctgtgcaggtccagaggtgccatccagagtcagtgactagagtgaaaaaccttagaaatccccctggtgctccattgtattgtggctgagctggcactcaaccacaagatgctgtccttcccactcttccctcccctttccaaaggaagaggagcttcacctgtagccacttccaccacaggtcacaagaagtactgccagacgaccactaatgttcccttaaggctcttaagtcagcttgtggtgaatgttgcctggcctgggactcaccttcagggcagtggctcctctttggcccagggcagatccagaaatgctatccaaggaccaaaccctagaattgagaacctcaagagcccatatgatgctctaccttcctgtggctgagctggtacctaaggtacaagacaaagcccacttttcttttatcccacttttctcaagcagtagccttgccttatagccaccacagctgtaaatgtgctgagtctcacctgaagccatcaagtttcagagtctcacctaaggccctcgacatagtacctggttatcggggtgggctcgaaaaccattcttttatgtccttataggagataacaaaagacacacagaaataaggaggaaaaaaagtgatgtgaagatagagacagagactacggtgatgcatctatacgccaaggaatgccaaggattgctaacaaccaccagaagatagaagagaggcatggagtcgttcttcttcagtgcctccagaaaaaaacaatcttgctgacactttgatttttgacttctgatctcctgaattgtgaaagactaaatttctgttagcttaagccaccaagctg

SEQ ID NO: 489 - DNA, 20001 bp, Homo sapiens
tttttcccttatattttaccttctttataaccaagaagaatctgagaaatgttacattagctttggaagtggttccacagaagactaattaaaatagaagaagtagatagtgctacggagttttaagggaggtccagggcttatctgctatatctcattaacctcagacacattttataagtaatttggacagataaacatagaggaagggtggttccataaactatttctagtaattcattgtaatgttttcttgacctcccgttcccggcacgaagatcataaatctgtgtggaattctttgctcaggatttacatattatatggcagaaaatgtgaaggaatattttcctattttgcagctctgcaatgtcaaaccctttgtttctttcatttgagtagaagcttcctaaaacgtgtcaatatttgccttgtcaactttctctccccacccaccacccaccattctctactgacacaagtgcaatctgcttccgctcgctgtttcaaaggcctatcgcatctctgaaactgctgtttccaaggtaacatatggccctctggttgccaaacctaaatatgctttgaaatccttactcacttgacctctcttggcattgatggttaacaactcccttgtttcaaaacactttccctctttggcttatttgatagtgtttccccctagttttgcttttatgacactgagggctttcttgtttttacctaacttttaattttggtgttatctgtgcttcatccttgatcctcttttttaattttctcattctatacccccccctgaacaattgtatctacatgctggctctaatctctgtcaactcaaaaatctataatattacctcatacgtctcttctggtcttcagatttctataaaaatttttataaaatgtaaaaataattatccatattgattattcaaaaaactcggatggtctataaatcgtacacacacatacacacacacacacacacacaccatcaccaccaccaattccattgttaatcggatttttaacaataatacatctctgttatagcctttctatggacctgtcatggtcctggacaaagtacttagaatcaaatgaaatacacacatgaccttttaggagctctaagtccagagaccctcagctctctcttagatctatttctcagaggctaccaggccaatttgtccttccccagcaaagcttttgttatgctatgctatatccaactatttccttatgttagtttctgtcaaaaggacagaaatttcccctatcttgtttctttcattctaactcaataaaggtttttgaatgaattttcccaagtgccacatactcactgtcttagtgtgtttgggttgccaaaacaaataccataaactcggaagctgataaacaacaaaaatttatttctcacagttctggaggctgagatatccaagatcagggcactggaagatttgatgtctggacactaatcccatccatgagaccttcatcctcatgacctaatcatctcccagagatccttcctccaaataccatcatcttgggggttaggatgttaatatatgaatttggaagacagaggactcaaacattcggatcatagcacccatgtgactattatatacacttgatgtaaaaggaaaattcttgctatccctcaatgaaatgagttttatatttatactttggcaattgttctctgagcaggccaagaacattctatttagccattcatagtatgtgcttgatatttatgaaccaaatcaagggactcatgtaatgcaggtgacttgataaacatgtggcctatatgaccacagacttttaaatgtagcttcagatgttaaagaattactaacttcggaaatcatctggaatttgtgtgtgtgtgtgtgtgtgtgtgtgtgtgattctagctaggatataaaagaaatgatatagattttattgaatccttttatttaaaaattcttaccatgtatttttattgaccttagtattacaatgaaaagccttgtttattgatattagcttatgcatcatagtgaaaatattgatcataagatttttaattatgctaaagtaaggatattttgtgaaaactctgaaattatatagaaatattggtgtatgtatataatttttttttttttttggttaatgctcagtagcttttatcagattctcaaaggggtctgtgtttcccaaatgttaagaaccaaagccacaatacacttttgctctgtattatattttacaattattactgagaaagaagaattttcagagaaaatgccaaatgaataagccaaaatatcttttttgttctttaaatttacactacacagaaatgcaagctctcttgatgttgaccctacaagggcatttctatttgtatctgaatagatttatatccaaatttggagagaagcccatgttccattaccatgcaaaccacaacatgcttgagattgctaattagggtacaaattgtggtggtatttctggtgacctggacatgtgttcaatagaaacagaaatgagcccctcaactcatttcacataggccagaaaacatctgccagatggttatagctttcagtaactattaaacaggatcacatttgaacaaatgacttagatatatagtgtttgagagcttactctaaaatttctaacatatccatagagattagtcttaatgaaaaactacattaatctacctcatacattgtaactagcctaaaatgaataattccttctcattttagccaaaatcaaactaaaaatgcctttatacatttttgtataatgctgacaaaacatctgggagatttattgatgtaagggtatctattaggacatcaaaattaatttcaattccctgaggtatctcattttaattaacaaatccgtgatcctgttctattaattagcatgttgaaggaataagtttgagatgaatttaattctaacaaagcatttatcttctataataataaaaaggacattaacaatctcagtctaatttgttttatacttttaataacagtcttgaaattccattcagaaaagcaatataagtaatatctattatttttaatttaaagctttattttgggtgtgcatactttttaaaaccatcattattaggggcaccatagttctaacattatacattttaaatattactaatgtgaatacaagttcattaagcatgttatattattaaattctcaattgtgtataacctatatatttatttcactctgagatagttttttttttttgatgtgccactgagtatgacagaaaacaggtagaatctatgaataattccctggtctgaccaaacatttaatttctgcatacttatatattttatcctagattactgttattggtatgtccttgtatttgtcttaaatacagctaaaacattttaggcagtaacataataacaaattaaattaatagtgcatctgatagcatattgaaagttctaatataatggaaaatattgaacaatttcaaataactttgtcttatgtcaagccacaaacaatggcttcagatggtattagagtattagaggaactgggctatataaacctaaatggcataattctgaaactactcattgaacttttccattctcatatctgttttgttgccagtaggatgcctttaaataaaaaggcatcatagagttgctctcaaaaaaaaacctctgatattcaattaatatacaatacaaaaaatcaagatttttatatggtttcaatttttgactctgtcatagttataacctatactgtatgttgtcacagttaaagagactgataacaaatattttaggttttgtgggccagccaagaggcaaaatcaagaatgttttatgggtctttttgtaacaaatgggaaaataggtttctacaaatcttatttatgaaattataaaacataaaaattggagataattttggggaatccaaggctactaattaggaagatgggattatcttttagaaatactatgtcatttaattggggttcaaaattagagttttctatgatcaaattaaattgcaagtgttcaactgttaatgctgatctgtaatgagattttctatatttaatctttgaaaatatcttcacacagacaggtactgccaaatactgatattaactcaacagcatatagaaagcacttaaagaattatgatatattcttctctagatactgccttttagtatgtcaccgcatttcagattatttacttaaaattgaaggttagatagaacctccttccattttaaaatatggaaatatcccttgaacttagaatgcaagtcaggatattcagcttttatttcttatccaagttcacgaaattaatgatgattgtatccacgagagccaatgaggatcactgttgacactcttggtagtggcttacctaatataaaaccttttattctcgttgtgtttattgacagtaagtcactgagttagttcgggtcctctaagaagcagacactaagatagaatttgacatgcaagaaatgtattggggaaaatatttgtaagggacaagtgtaaaagagctggaggagatggggaattctttggacaatacacaatgctgttctgacccacatgaataaaagaagaaatgagtgtctgcagtgtagtttgtaaaaagttttggtcaagccaatggggagcccttgagccaaagccacccatcagaggcatttctgctgtgctcaagtgtggcctcagcataataatgttggcagatttgggtgcaacagttatggctgtcagtcaattacagtccctttagcaagaggtctgagtggtacattttcatggctgccatagtccaccatttcctccaaatagatttacttctccgccctggtttgggagaagttgcatctttgtttccaggggtctttcctcctacagccccagtcactgcaggggatcttgggctgcaattggtgcttacttgtttctatctacaaaatccattctaaatccctgtgctcagctatcacatcagtaaatattgattgattccctggtggtgtgattcaaactttcattcctgaggatctgaatgcttgatgaatataccctactcaggcctgggttgctgcatgttcaatgggcaagggagtaccaggaggtgctcatgtgaataatttgagttccatgtgtttctccttgtccccattgcagaacaaacaaactaataaacaaacacacccctatcttcacctgttgctcagggtcaattatttttgttagtacgttgattactattctcattatttagtccctggatataaggagccttggaagacatggtgttctggggcagttgtagcttataatttaataagacccttgctgttttactaggtaagaggatactctttttggattgcatgacccccattcctgtacagcccagtattgtagagatgagcaacacaaaattccccagtgagtaattgggagcgatgataagtagggtcactgttgtgtatgtcctttagttcttgaatccatgtatttttactattgaggacaaaataccataccaagttctctgttttaattcatataaaacataccaaagaatgacatctcatcttttcagagaattacctttgggctggtactaaatctctgcctttaaaaagttgttccagcctttgataaaaccagctgcttctggatgttaggtgtgtgatttaacctgtagattccatggtcataggctcactcttatacctctgctctgtagaacccctgctcagatgctatgctatgtgaaattcttgctatgtgaaattcttgcttttagattagaaattccataaattcttataaagtgactgattgaaacggtgtgggtaaaaatggcaaaatcaaacctagaacaggcatatatccctctaagagaaatgtactgatgacctttccagtatgggaggggccaagtggttggttgctctccccaactaataaggacatattgatgtcaagaactgtgaaggatctgacattttacctaatttgtcagtaattaatttgtctgccatcgtttcattgattttggaagaaaaaatgagactcttggataggagacaatgtgccagttaatacttaaaggaaatgcattagtcagaggatcattttttaaaaattaatattattttcaactgacaaatcataattgtattacatttatggagtaccatgtgatgttttgatacatgtatacaatgtggaatgattaaactgaactaattaacatatccatcatctcatttaagatttcttgtgttgatatatttgaaatttactctcttagctattttgaaatatacaatattttactactgagtatagatacccaactgtgcaataaatctcaaaacttatccctccagtatagcagaaacattgcaccctttgaccaacaactccccattcccttgttcaccacctgaacccccagcctctggtaaatctcgtcttctaaaagtaatcatcatttttgttctggtttccccagctccaaatcccaaagaggtttgtgaaaaggaatacatatgcagtaagctaaactaaggggcaattttagggaacacagatattttatatgacaagtaacttgcattttttccctagagggaggagtaattattttactagtgaacaaacctgccctttcctccaatgaaagacaagatctgtctttcaaggttgtttgctataaaaacacccttgaaaagatggttctgaagaaaaccagagccactgcagacatgcagacatgtgagagacacatggagaattgtttttcaacaatcaggtgcacaattggtctctgttgttgaacgagttacacattcagaaacaggaatagctttgcagaacttgataagtggacgtccatgctcatgggtccctatgtagtgtccgtctttgctattatgactattactttaatgtaccctctgtgacagatctggggttgttgatgatgacatacgctaaagtcaattagtcaagtaattttgactacttgtttttccagtccctttccatggtgtatgatttgtggtgggcattaaagttgccacaaaaatatacatactttctgcccactccatatagccagacatgtaactctgccccataactttttgtctcagtcctttccttctagttccttgaccagaagcccaggccactggctactgccaaggaatctgtttatattctctccaccagaagtggactctgtgtcacttcttcacaaaatagatgaacaggaacactgcttgcagctcagcatgttggaaagttttccatctgtaatatcttcaaggctgcacctgaatatgactgcaatgtagtacatgttcattttatgttgatatcctaagctaacccattaataaaccaaatcccagcttttttctcctccttcagctggtcatatgccaccacactgtgcagccatagtgtacttatggagatatacacagatactgtggacaatgaaattagccacagtagctactgaagattagtaggaagataaataaaagacttgggtctcagccaaatcatatcagaggttctgaaaaactaaataatttttagcggtctaattgaccacaaaatgattttagatttatatctttgtatacatatagaaattactctgcatatttcttaaacagcttataacttatatagaacttttgatatgctctaaatatattagataaatatatgtatttggattaggcaatatattataatatcaaagtttattttgagcttttattcttggaaacctattttgaagtatcttacaaactttgtgtatatcaatctgctctcctaggaaatgatttcaaattgtaggcttcaggataagcaaagaacatacttcaaaaataaaaattatcttcctaccagacaactgcttttgcaattcgtgcaatagccaccttcctggtcctcttttcttcagttcacacagacctaggcaaaattacaccatgtcagttttctgcttggaactcttcaatggcttatggatgcccttggaccatcattctcagcaaactatcgcaaggacaaaaaaccaaacaccacatgttcccactcataggtgggaattgagcaatgagaacacatggacacaggacagggaacatcacacaacggggcttgttgtggggtggggggggtggggtgaggggggagggatagcattaggagatatacctaatgctaaaagacaagttaatgggtgcagcacaccaacatgcacatgtatacatatgtaacaaacctgcacattgtgcacatgtaacctaaaacttaaagtataataaattaaaaaaaagacgtggaaaaaaaaatgtcaaaactttttactgaccttctaagccttataagttttgttccattcttagctcccaggctcatcttcctcccttctccaagtttctgtcttaactccaacaactattggtaatggcaaaaactggaaataaccaaatatacatcaacaaggaataatttgaattaattatggtatatccacacaatggagttctatggaaaacttcaccactttgtctgtatgtgtgtgtgtatatatataatatttgtatatataatatgttatatataatatatgtatatataacatgctgtatataatatatgtatatataatatgctatatataatatatgcatatattatatacttatatatactatatattatatcaagtacatatatgtgtattacatatgtatatataacatactatatatttatattatatatacgtatattatatatgtacatacaacatactatatatgtatatatcatatatgatatatgtatatatcatatatgatatatgtatatatcatatactatatgtgtatatatatcatatattatatatgtatatatcatatactatatatattctacatatactatatatgtataaattgtatattatatatacatatataacatactttgtatgtataaattgtatattatatatacataataacatactatatatgtataaattgtatattatatatacatatataatatactatatatgtataaattgtatattatatatacatataatatactatatatgtataaattgtatattatatatatataatatactatatatgtataaattgtatattatatatacatatataatatatatttaataatatatacatatttaattatatatacatatataatatacaatatatgaatatattatatatacacatataatatacaatatatgaatatattatatatacacatataatatacaatatatgaatatattatatatacacacatatggatatgcattatgtgtgtaaatattatatgtcatatatattatgggtgtgtattcaaatgcaaccacaaaataatagttacctataggagaagaggaaacagagtgcaggagcaggacagaagggacaggatatcagctagatgtcattgaatatattttgttttgtagatttggcttttcaatcatctacttgtttccatgactgtaacactaatttaaatttaaaagattcaatgctgaaaagccaaactcaaaatacaataagtctaactaaatattattggttgcataaccacacagaaaatagaaaagttattctattcctgatgacttagactctccttgaattcatttattttataataggtcaaacttctttttgctttctgctggatcctttttgcaaacatttcatgtcccgctacttggggacctccctgggtcaatgtggcttataaggagtatacatacacatgcttgcccatctcacacccatcatttatatatcaagatgcctcctgttgcatttttaattttcacacatttccagttgagaatcaggcactgactctagcaacccatgaactcccagaatctgagatcaagttttccaagtgatagggttgaagctctcttgttgttttgaggtgactaggaagcacatttcccccctttctatagagctggaaaatagcaggggtctctgacaattctctccaaaaacctgttctctcaaagtcatccaagaatcactctcccctctgcctcttatacagccttgtggtaggtggtgggctaaggtgtctgactattttagggtcatcatttagcaagtccaacacagcttctctgatctctcttttaaacatgggaagaagtatcctcttttgttctcagctttggagtttcaactgatagtaaaggtgcaggaattgcaggcctgatggttgaacagctctggacaaatttcgacagccatcacagcagactagaccacagacctttggtaaactaccagactgccagcacttgaccactcagccacctttaagaataagcatccaaaagagtacttcatgcatttgaatggtgataaagccagatgttctccttatgtaaaagaaccaatgaaaggtaatacagatttgagcagaatgacatggagactttccttattgtacgtgaaacacacatcctagagttaacagagtagagagagatggaaaatgcctgatcgtcaatttaactattgatgggaaatacataatgtctataacttaaaaaagtcaagactttatatacccttgtggtatgtatgaaaaagcacataaattaaaaatgcaaagtaaattacaacaaaatggtaaaaaattaaaaatcactctcactggggattagaaaataggagttctttgataattcagcagagtaagtaatttaatttgtagaataagcatccttctctttttaaaataatttgtatagcattttttcttttgtgaagtgatcagcatcatcttgatcttaaatttgcataatgaaataaatctaaaacaactgaaaaaaatgtaattagaatatgaatctgctctaagtgtaatcatgactgtgataagtaaatatttgatttaaaaactttagttaactatttttgaggcaaatattatgtgaagaaatagtagatgcaatggaagaataaaaaaaattaaaacagcatgaccagtgttcattacatgcaaatgtctgaacctgttggacctcaaaccctgtatacaatgcccctcaaaatgcatgtttacctcaagtgggctctttattatctttaaatgcactgttagaaactagccttattcgacacagtctagggtaaggcacaagaaagtttaactagaataggtaattgattttatgtctaaattatcagaaagtacataatgtatgtatacgctatgtatcaaaaaatacatagtgtacacatataccagagctaagaatatttgctactttgaaagtgaaatattttcttcatgttcattttttcaaagggatgtggattttagctatgtctatattataaaaaagtatgctcaggagttgaaggtaactttttgttgcggaaaaaaacaaaccctcaaaagacttcaaagggaagtctttttaaaacgaaacaaaaacatattgactcagagttgggatggtaaatattaggtatgaatgttaagtaatttaggttggatggtgtatttattcagtgagggagttgagattgtggttgacttcccaacatctgtgcattcctcacatacatgtaggtgtcatgcgacttaccaaattgtccccaaatccaacaggagatacttgagggttcccaggaaatcctgaaattcctgctcctcttgtcagttttcagaaacttaggtatatggcagccagtgcattgcattcccctggtgacattactgggcatataaccaaattggccaagttagtccaatagaatgaaattttggtgtgttgttagggcagaggtgttttctttctcttgaactagttaggaacaagaaaatatgtggctttggttggtgctggtaactatcttaaagccatgcggcttggaactgccttaaactgaagctgctaatggcagaatggtgacaccaaaagagctggtacttaatgacagagtagaacagacagattattcaaccctagactatctaatatataggccccaaatttcctttttgtttaggccattttgaactgacttctgtgtaaaatgtagctgaaattatcctaacagatctataattagggcaaaagttcggatccctgatatgtaagtgtccaagaacaggtagctaatatttattacactaaaataaatacttaaattattttttacttacttttttttgctttttctttagatacactaataaagcatttagttaagtgcctagcacaatgtaaatgtgtgtttaataaaaagtatctatacaattaaaaacagaaactataaatattcataattttaaaattaagaggagaaattttcagaacagagccacctagtgggaagaagaatgtgctatgaggacaaaaacatttgttttgatatttcagagaagttctgtggaataaaattaaagatgcaagtaataactatttttataagatataaatagtataaaatactttgctagtaacttgtcattaacatttcatcttttacagttaaatggtaaatgaaataatttaatccataattatttctatacccatatatattattagtaaaggatgagaatacccatgtttgtgtgtatgagcttcttattgccaagaaacaaaattcccctgtacaaaatttttacaatccttttcccctcttctctctacaacaagtcagcaggacacaacttactccttggcttttttacatctcagtcgtcctgcgtgtaaattacggttactaatgattcctcagatcactgatctatggaacaacactgatcaagcatcctaaaattcttggttagctgtaaattaaaagaaaatttctaatgacacatttttttcttatgaaataaatgtatttttagaaatattctgtaacatcagtgaaacaagaaaatatatctttattttgtaaatatatatagcagtattctatcaagtttgaatttctgtactataacggcttcatctgctttgggggtgcacaggttttgggatcttgagtacaagtggaatcagtgtacaaaaatgtttatgaataactcagtatattttctttcatctttgctctgtaatatcaaatatatatatttatacacacacacaaacacacacatctatatatatgactatgatgttcagagtacctgttacttgttatgtggttaatcatttttcatgtctaactgatttccttgaaatgcatatttattattacgtcctcttgaacgttagtcatgcaaactgtaatgtagtcctaattttatgtatttgtgtgtgtgtgtgtgtgtgtgtgtgtgtgtgtattttatactcattgctttccaactgatttctgaatgatggaacatgttttttttttagccaaaatattgctattggttagtttttgaaatgtggtgtgaggctttctctttcagtagtggtgggtttgtaaaaagaacttagaatttgtcttgaatgaatttcctcatgatgcagggtacccatatgtgagagggctgagaccttgccctctgatcgcagaatgatacaatgacataagttaatttctaagaagatagcatctttgatctggattgtatgctaatatgtagagaagttatcacccttatcaccttataagtcagtgaatgaataaatagtgcatatatgagaatacttcagaaaatgagttaactttcactacatataaagttacagatataacatgaagatattacatggtagaaaaatagtcacttgcttttatctttatcacagtaattaatcaaatattacctcttggttctttcaaatgttgtggacccaattgtttaattgtcatcaatatcatagacaattgaagattctcttagaaagccactttgggcccagctgtcaggagaatgagaatgtcttatttccccactctaggcatttccattaaaggataatcagattcccacaaaccctagggctatttgccatttggatggcaggaacagctgtggagtccagaaggtgtgtgtcgggttctcctactaggaaggggtttgggggactgattgagggagaggccttaggtttggaatagattagggaggtagctcaggtctgcaacatagtattcaataatacataactgttctgagggggagggtcatcatattcctcacatattgaaaatttaaatttaatagaatgttttaaaaggttgaaataatgtatgcattgcatgtagagtagattatatgtgaaaattaacatagccaccaaataaaattgtaaagggcatattgattcatactaaaatggagatagttggtaggggtttaggtaatatttacttcagaagatagacctttatttacttcatattttaagcactttctttaactcaaggagattctcactctcaaatgctggtttatctgcatctacatggtgaaatattgccatcatgtggctagtccgtctatcacacctgctttcctctgggagagattgtattttggggtatttttatatggtgcttgaatgtttgggttatgttatatgatacccattttatatgggcatgtatggtgtctgttggggtaattattttcataagatagaaaatatttaagcatattaattcaaaatacacattaaattaaattttctgttactgtcactcaattgggttttactttgtatcttctggagctcttagaaattttccttttcagtgggcaaattattcaagttgtaaatcttaaactctttggaagtgccctcttaagaacccagtttcttttttttttttttaatgtttgtgtctactctgaaagtcaccactagttaccaaaatgtccatttatttgtatacaatttggaaactatttctgatgcataccccattataaacaatagggggcgatatgatgtcatgtttttggtttctctatgaaagtatttttcatagtataagccctgtttatttttttcttgataacaatgcttccctaaaatgaaaagcacatttgttttattatgacagtactggcaataaatatcagcctccttatacatacttgggagatgtaatttcttagagaaaaaattctatgccagtttattagtatttcaatacatgtatgtatttctaaattgatataaatatccaataaacttatatttaatccagagataatagtttccaaatatacgttggcttggtttctcattaaattcagaaattttaccttttcaagtgtttttcattaatctttttcattatatattaccatgaatgcaaaaatgtagagttatacttcaattttaggttaaaatcatgaaactatgtacctggccttttaaaagtttgaaatctttagacaacaaggatacaaagtattaaaacaaaaattttttcaaagttacatgattttcttaaatcaactaagaagttctttcaatgtagggtatttggatattttatattttcaaagtttatatgggatttaaggttcagaaagaatataggataaaatagtaatttataagttaaatatttaagttcaaaattgacagtttgggatagaaaaatatatgtatttcaatgggaagcatgttttccctgtttcttcaagtagatacaagtaaactaaggataatacaactcccatgtgagattataatttctgtctccctctcaaatagaatcacagttgtcagtgcttttaaatttttgttaaaattgtatatatacacacataatgtatatatatatatgcacacgtaactattacattattgtactctctttatctcttcataaaaaataaaacattaaataatattctaaagtcaacttttaatttttttccagctcgcagttcccttatcagataaagttaatctttactatgaatttgttatatatgctaactttttaatgatttaagtaaaagtgactataatatatttttcaaacatgttttttggcattaggagccctaattttacaccaaaaaaaggaatttttaaaaatactttatatccatttttaaaaaatttcaggttggttgcctgaaattagccataatgcgagaatttacaccatgaaaattagcaaactgtacacatcttggctctttttcctttttctggagagctcgcgtatttcttagctggagcaactattggcattttggttagaaaatgtcttcttgggccgggcgctgtggctcacacctgtaatcccagcatttgggaggctgaggtgggcagatcacaaggtcaagagatggagaccatcctggccaacatggtgaaaccctgtctctacaaaaattagccaggcgtggtggcatgtgcttgcagtcccagctactcgggaggctgaggcaggagaatcgcttgaacccatgaggcagaggttgcagtgagtggagatcatgcaactgcactccagcactccagcctggcgacagagcaagactccactgaaaaaaaaaaaaaaaaaaaaaaaaggttttcctatccttgacaggatatttagcatctctgttccttgcccattaaatgacaatagcaaactcaagtcagcaagtcagtaaaaatgcccccgcaagtttctaaatgttccctgggagaatatcaccccttccaaatgacacccagtcctgcagggttgactaagcaacatgcggcagtgcagtaatgaaaactctcaggctgggtcagaacttagacactaagttgaaaactaaattgagacaaactgataaaaagatttaaattatagtctgtattgcttaacttgttggtcatatggttggtcttactgatatgatcagaatgttcaaagacagaaaacagggaaaccatttaggaagccatagtgtgttgtcttgtgaactaatggcgtttatttttcttccgataacattacatttcaagtgccttccagactccagagttctgctgtccaatattgtggccactaggcacatatgacattaaacagttgacataaggtgcaattgaggaacagaatttctaattgaattatgatgtgacgaaagtgtatatacactgaattttgaaaacttactttaaatataaagaaaatgcaaaatatctcatttattaataattatctatattaaaaagattgaaaagatactattttggatatactgggttacataaaatatatatatatatatatatatatatatatatatatatatatatatataatttttttttttttttcttttcgagacggagtctcgctctgtcgcccaggctagagtgcagtggcacaatctcagctcactgccagctccgcttccctggttcacaccattctcctgcctcagcctcccgagtagctgggactacaggtgcccgccagcacgcccagctaattttttgtatttttagtagagatggggtttcaccgtgttagccaggatgatctccttctcctgaccttgtgatctgcccgcctcggcctcccaaagtgctgggattacaggcgtgagccaacgcgcctggccaaaatatattttaattaatttattaattttacctaattcttcttgcctttttgacgtggctactaaaatatttaaaattacatatgcagctcacattatatttctactagacagtgctgctttagaaggaatcacgtatttttctttctgagccccttgcagttctggtggtgttgattccattccaactctggaggtaggcagtgatttacgcctggccaatggaaagactgtgtctttttagggaaagttatgtgactcaatttcaaccaaagccagcttggagtaggctttaagtagatattatattgtagcagcataacggattataactgaagacagagagacattgtttgtaattccatctcagccactaattagtacaaattacttaaggtctttgagccacagtcttcatctgacaaattgggatacaaaatatttgttttatttggttgttacggggattaagtcagatactgtatgcaaagcatttacgagtactcccgacactgtgttcaatatatagcagagtttaaacgtcattatgacattagcaaccatttgtttttttttttaaggcagacattgaaagtgaaattcgaacgagattgaaaatgtcctacatcctaaatctcaggtactcttctctgaaatattatacaaaagcattttaatatcagtcaaaggagcatcattttaaacaacaattttgtagggtttattattgttttaccaaattaataagctaaaacagcttgaattttctagtgtttttgaaattatttttctcctatgtaaaagttaatgtaattttagtgaaaacataaacctaaagggataagcctcttaaaatataataatgcattgttagatttttgtggacttgtcataattctgggtgttctttcctgcatacttattaagaaatctgggaagtataaataatattgacgtattgatgccatctgatcattaactgattggaatgaatgataaataggagttttattagcatgtgatattgaatttgttttgaaatttagtctcttctaatgatatgctaagttcaaatccttaataacctggttgttggcattcttagccaggcatagtggctcatgcctgtaatcctagcactttgggaggcctaggtgggaagaccactcgaggtcaggagtttgagactagcctggctgacatggcgaaactccatatctaccaaaaatacacaaattagccaggtgtggtggtgggcacctgtaattccagctactcaggaggctgaggcaggagaattgaatgaacccggaaggcggaggttgcagtgagccaagatgacatcgctgcactctagcctgggcaacagagtaagactctgtctcaaaaaacaaaacaaaacaaaataataaaaaatttttaaaaagttaaaaaaagtgactcttcttagttttccatgtgaccttcaatttagtctttatttaaccttgggaaatgaatgctagtgtataattagtaaaattagaaattaagatttgtatttaggatctaaactagaaatacattgctagccattaatatacatgtcagtgttactgaaaacagttttatataaccacccacccacccaactttgctccttttgtaaaagtgacccgtaaattcatggttcaggcaccatacgcaactgttgctgagtatctgagtcaagtaaaaaacatttatctttttgattacatgccttctgttatatgtaaatttttacaaggtttcattttttttttggcaagtcataatttgttttatataatctaagtttcaatgaaatctccatccctcaatgatcttaacaaatttccatttttaaaggttacctctagatttttaaaatctgtgttttaaattacaacggtaacagacaaaatatttaatgactgtgtttacacttttacttctgtcctctgatctacttatgatactgaaagattatgcagaatgtttgatattatctacattccatgttgacaaaatacaagggtgcaacagagtcgattactgggaagaaatttttaaaaattatttaataagttagctggaataagataagctttcttattatgatagaattttttcaaatttttaaaacatgattttaaaaatgaactgcttgtaatgtaccagttatattcaactcagacacaaacaaccgaacatgtacagatagctca

SEQ ID NO: 490 - DNA, 20001 bp, Homo sapiens
ttaattgtaaaagtattccttcctttactgattcctacttaaaaattctggacactgttttaacttgtattttctgaagagctaatagtgccttatattagaaaattaaccctctgttataatggactgcacagggttatattataataacttagcaaactactatattgtgagaaggaaattgctttgtgtattcttttttcttcagctcttggtctgacagcagctgttgaagggtgtccaaaagtatttctgatgataagctaaagtcagtctttcacatctaagtctttccccttagatagttggctggataaaggtgagagcaggcaggtgtaggggttggaggcctgtggttctggcacatcttgtttattaactctcctgagctcactgggggttctattttttttttttttaagagacagggtcttgttgtgttgcccaggctgaagtgcagcggctgctcacagatgcagtcattgcacactacagcctcgaactcctgggctcaagagatcctcccacctctgcttcctgagtagctgggactacaggcatgcatgaacacacctggttttctgtcatgattcttgaacattaagcttgacttatctgagaatcacctgtattgatcctggataaatcaacaggttaattggtccctggggttaaagttctcatgagataagtggcttttctagcaaataacataatcgggctgagctaatctatttttccaaccactaatgtacaagtgggaaaatctgattcaatgacaactaaaggtggcttatttagcatcatataaaattagagaaagttgatcaactcacttaggtgagtatttcttctaccaggatccctagttcagacagtttctctgggtggttctttttgtttctagtaagtgaagcaaactcttatacttaagtgaacttttcttgctgctttgtgttctatccttttgagataagatatgatatgtttagatttctggattccagtatgtattggcatctgtttagtcaggaatacatggattctctttccgtctaaaagtcagattaggcagaaaatggcctcaaaagagttgtctatcttgtttattcctttccctccagagccctgtatgagaagggtctcacaccccccgcaccactcctccagaactgcccaggcaaggtcctccataaccttcattttgcttaatactatggtctattattgtcatcatcttaaatcctgagcataatttgacacagttgggcactcctcccctcctttacgtactttctcaacttggtttccaaggcactgcctttgcgtggatgtcttctacctcattatctgatcctccaccccctccttttcctgacttctatacattgcgatgcctcaagacatggccctttttcctctcttctttgctagctgctgtcactccctggatgatctgatcttattttttgcctttaaataccacctatatgccaatggctctccaatttattcttccagcttctatgtgtcccttgaaccccaagctcatataccagctgtgtacttagcaactccatctgggtgcctggtcaacatttcaaacttaacacgtcccaaactaaactgcaattccacccccatccaaccagctccctgccttttctcagcaaatggcagctccaagccaaaaatcttcctgttatccctgactgctctttttttttttttttctcatgccctggatacatgatagctgtgcccgtatcttcaaaataagccaagcatctgactacttcttatcacctcctctcttgctactctggttctagctgccatcatctctggcttgaatgactgtgataatctcttaactggtatccctgtttctacttccctaccatcactcattctcaaaagagtgattcgttaaacatgtaagccaggtgatatcattcctttgttgcaaatcctcagtattacctagaataaaagccaaagtccttacagtgatttagaaagctctgcccagtctctgaccctctcccaggcactcaggctccttctgccctgctggcctctttttcccagcacccattgccttgaggtctgtatgtgctcttccctcccactcacatgctcatcaccccctccctcacttcaaatcttagctaaaagatcacatgttcaaagagaacaacatgactaccctatttaatagtgcctaacatctaatgtttcctcttccccttccctttccagctttatttttcttgagggcacttatcttcatgtgacttactatctaccgtacttattttttctttattatctgtattccctcccttgccatatttagttagtttatgttcattgttgtaaccctaacactggaggagctcctgccctatagctggcccttaatagatctttgtaacattaatgtatgattaagaaaatgtttgtgatcagacatggtggctcacacctattatcctagcactttgggaagccaaggcaggaggattgcttaaggccaggagtttgaaaccagccagggcaacatagtgagacccagtctctacaaaaataataataataataatacaaaaaaaatttgccaagcatagtggcgtgtacctgtagtgctagctacctggaagtctcaggtgggagggtcacctgagcccaggagtttgaggctgcagtaaactatgattacaccactgtactccagcctggcaactgagtgagaccctgtctcttaaaaaagaaagagtttgtgttactggataccctgattgggtgggatggaagcacattacatctgtgttagagtccaaactataatatgtgaagttttcctttatatgtttggctgactattcaacaaatattaattgagcatctactctgtgccaggcactttgcttggcattaaggatagagccgtgagcaaaacaggtctccatgcttttaggagctcatgaatgttcctccattgaaaaatttattttgcaatatttaatatataaaaatacattaaaaacatattctttatatcaaaaacatataaagaataatgaattcttgtatgccgtccttacccatgaagaaatgaaacattaccattgcaggtaagcctccatttcctcccttgctgccataggtaactgctaacctgaattttttatttatcaatctcatgcattttaaaaatgtgtttgctacatatggatccctgaaccacatatagtactattttatgtttaaatgctgtaaaagtgcaggtctgctttttgctttgttcactcattgttatttatgagattcatttgtgttgatacacataagctttccttttcattgctgtgtaatatctcacttactcatgcatttccctgtaccctgccaccttacttatccattcctccatgtcccctgcttcttaaaaggggaatggataagtgagatatttgtaggttgtttccagttttttgataccataaatattgttgccaaagatatccaaaagaactttctgcaatgatgaaaacgtcctatatctgcactcaacaagactgttgccactcaccacatgtggctatggagcacttgaaatgtagctagtgtgactgaagaatcacattcttagtctgtttagttttaattagtgagattgataactatcgtattggagaacacaattctacctagtgttatctttgggtacatatgtgaattaatcttgggctgtagttcttaccacaatcagacctgatgtactcttttattaataaatattttgtatcatcccacttactatcttgaaatgaaattcataacttatctgcacacattttaaaaaatcattgcaatacactttctatgatataaactaaaaatgtaagaacagtaattttaataaaataatatttatttcaatatgtcagtaaccacaaatacactccactacattaggagacatgatgaagcagttcacagatgcagagtcatagaagattgtgagactggtaactcaagcactgcaagtgatgcaactattggtaatgtgaagaactcttggtaacattctgaacaaaacacaattcaggctgcctttatctagtagttgcatctctgaaaaatttggtatacaataagaccttacagagtacttatcatttatatctaaaacagggttacgttatactcttagataattataatcgggtttcccacctatataaatgttctactagaccttctaaagtcatgaaggacccagcacaattcttttttgaatgaaaccatccaaatttcaggacatacaagatatctggcccttacctactaaatggcagtaacacatacacacacacacacacacacacacacacacacacacaccctccatcactattataagcagacctgcctcccaggtgtggcactagttctgttgagacccattggtctatggtacatacccagcagcaaaaccactgtctcttaagatatgatcttcttcaactttaccgaatatgagtttgttctcccagttactccaaagttttccaaagggtttagaccaatttacattcccactgcaagcatatacaatgtatcatttctctaaatatatgcagtttttacctcgaaagtgacacttttcctaggttatagttttgctgatctcaacagttggctgttaaaaaacgtaacttacctatgttctataataactctttgtacatctccctccaaagtaggacatcccacttttttaagtaaacgcagaatagcatgcctgctaacctgaatgtgggtatagtctcttccaccatttttcccattgttgctatggccctagaagacctaaattctagctcctcttcactaaccccagggacacctatctccatctccttccacctcccttcagatttcacagggatctgatggaggtccgctggtccttcaaggcactaaaacaccttgaaatctgaatccctagtttcatagagcagatgcagagtgaggtaaatggagccaagtccattactattagaggagtcataacaacctgacctttacacttctgattatagctgtaaagcagttattgccaccataatggcaaaattctccacagctcagtggctcacaatagcaagcacttattctgacactcacaggcaacttcagctgggctgatggaggttcagccaggctgggcagctctgcttcaagttgcacgttggctggttttggttctaggttttgggttgggtttgggtcacctcctcattttttattctgcaacttaggatgatggggcagaggccaaccaggccttgctctccaggcagatcactggagaacaagacaatgtgtccaccactcaagcatattgagaactgcgcttgcatcaagcatattgagaactgctgcttgcatcacacctgctaatttccagtggccaaagcatgtcacatagctaagcccaaaggtaggaaaatatattccactctgaggaaaaggtgggagggagtgtttgctgaacaataacccagtccaactcaaagcagtaaacttttgtaatgggatagagtttgtgattaatagaacattttttcttttatcaccaaaacatagcaaatgtatcttgataatccctcttaactatgttgtttatttgatataaaagaggaaaaactattagtggacctggttggggaatgggtcactctaattacctgatcgttcctactaagtggaggttaacccttcctatgaattgcatctgccttgactctggaccatgtacatgactactcagatgaggtgaccatatgtatcacatctggacttttttctaggctcataaggttgttttggatattgtcttcattgtccactttctaaaaattgcactttgcaagtcatctttaggttaggaatcaggatggtattcatagtgatagtatactcataaaaatacaaatgtctctgataattgtgttgggtttcaataaactttattctttagagcagctttaggttcatggtaaaattgagcaaaagttttcagagagttcccatatatcttctgtccctggcacactcacagcctctcccaatatcagcatctcccaccagagtggtacatttattataatagatgaatctacattgacagatcattatcacccagagtccataatttacattaatgttcactcttgacattgtacactctatagctttggaaaaacgtataatgacatgtctccaccattagagtatcatacagaatagtttcactgccctaaaaaccctctgtgctctgcctattcatttccccctttcccctaaaccctggcaccccctgatcttttactggctccataggttagcccttccagaatgttgcatagttggaatcatacatacacatggagactttcagtttgtcttctttcacttagtaatatgcatttaaggtttctccatgtcttttcatggctgaattgctcctttccttttagtgctgaacattattttactgtctgcaggtaccacggtttatttttccgttcacctactgaaggacattttagttgtttcccactttggacacttatgaataaagttgccataaacattcatgtgcaggcttttgtgtagacatgtgttttcagttcctctgggtaaataccaaggagcacgattgctggatcatatggtaagaaaatatttagttttgtaagaaactgccaaactgtcttccaaagtggctgtatcattggcattcccatcagcaatgaatgagaattcctgttactcctcatccttaaccagcattgggtgttgtcagggttctggatttggggcattctaataggtgtatagtagtatcttgatgctgttttattttgcatttccctgatgacaggatgtggagcatcttttcaaatgtttatttgccatctatacctttgttggtgaggtgtctgtgtagttctttggtctattttaaaactggattgtttatgtacttattgctgaattttaagatttatttgtgtattttgaataacagccctttatctgatatatcttttgcaaacattttctcccagtctgtggcttgtcttttcattttcttgatgggaaacttttaattaaacagaataaagcaaaaaaaaaaagttttgaatcagacattaaatataaaatctcagaaactgtaagcacgtctgagacattaggtttctttaaaaagtgatcgtcaaggtaatcaaagtgcttctgaatttcttgacaaaattagaaagctttaaaaactaacatcaattgttagtaaattatatgaaggggggatcatatctgtctcgttcacccctatatccctggcagagtgcctggcatacagtaagtgttcaaaaaatatttttaagtgaacgaatgttcattgtgggttagcaacattatagatgttattttatttaatctccttggtaatcttaaaagttagattttggctgggcacggtggctcacgcctgtaatctcagcactttgggaggccgaggtgagcagatcacaaggtcaggagatagagaccatcctggctaacacagtgaaaccccgtctgtactaaaaatacaaaaaaaaaaagtagccgggcgtggtggcgggtgcctgtagtcccagctactcaggaggctgaggcaggagtatggtgtgaacccaggaggcggagcttgcagtgagccgagatcatgccactgcactccagactgggtgatagagtgagactccatctcaaaaaaaaaaaaaaaaaaaaaaaagaaaagaaaagttagattttggtgtcctcatcatggcaaaattagaaaactgaacttcttggcaaaattagaaaacttttaaaaactaacatcaattgttaataaattttatgaagggggatcatatctgtctcgttcacccctatatccctggcagagtgcctggcacatagtaagtgttcaaaaatatttttaagtgaatgaatgttcattgtgggttagcaacattatagatgttatcttatttaatcttcttggtaatcttaaaagtcagattttggtgtcctcatcttatagatgaggagactgaatctcagggagataaggaaggtgcccaaggtcacacaacaaggaaacagcagaaattgaaatcaaattacaatgtgcctgactctaaatccaatatttgttctactatgacactcgttttagcaaagactgagagttgcctgttcaacagccatttccttctgtgtccttgaggacagaccttaattgtgtactagtgccctagacccttaagtgattgaagtaaatccttattggtctgcccccattccccatttctgtaaccagtttagaggtttggaatgtgacctggttttggctgtgagactggagaaaaatattctggtagtacagatgggggaggagtttgggaaaggatttttgttgcccctttaacaaagaaacacaagagagaaacagacctttgtttgactcttaagtgttgttgcatagggatgtgatgccacagctactgaagccatcttgctgtcaggaggggaatgagaagacacccctaggtgcctaacaaaccgttggactcccagcatttttcagaaagtggtagccctcagtcaagtctttggttttcctaagatagttacctgagcatttgggctgcccaggaaccagataactggagtatcagtcactctgtaatacataccctaccaaaaccagctccacagtttttgaaatctctattacaaatgcacatgtaaaatgaaatgctatgatagtttttattgttactttatggaaatgagatgtcttaacttattcattcatttactagccatttcctgtatgccaattgctggcaagcatggtaagtacttgatagagacaggcactgcagaagagcaaagggagatactcaaccagcctggtggtaggttctaagaggaagggtctgggaaggcgctgtaccagagctgacaagcagtaacacttgaatgaacccaaaaagaccagtaggaattatccaggtagataaagaaaaacagggcattccctgcaaagaaggtagcatatgaggtacatggagatgtgacagaatatggcacagctgaggaagcacaagtaattgagtgcatagggtgcaggttagaagaattgggagggaatctaaaagaggtaaacagaggcttgctcacaaagcaccttggccaagctataggtgagacttattcagaaagcagtagggagttactgaaggatattaagtatgtgctgaacatgacgattcttgcatattaggaagatcactttggcaacagaaagaatattttggagaggaggaaaggagaccaactgagctgatgtgctgctcaattgtgctttcaatggagaagcaatgaaaaggggcttttagattcaagacatacttaggaaatggtttagaacttggtgaatgtatacgagagttcagcaaagaggggagtgcaaggttggcaaagaaacacagagctagctaggggcatggaggaggctgccagactgttaagggctcagttgaggacacagaccaagaattaatggctctagtgcacatggtcgagtgatttacttagtgtggttttaggagcaaagaaggatggatcaatccacatttgggtaagtgttgcagaagcaaaagaaagcaagaagagtgagaagttggaagtattgtttaaagagacaggttgaagagctaaaccaaagcaggatgaaggaagtaaaaccagaagaggaaagagagggatggggcttcacaattgtggaggagaagcaggtatgattggagcaatgaggattgtaggagctgatggaaagaaagttgaataggtggagtagctccaggtaatactaaggggaaggggtgagttgctgatatctgtgtggagatgaaggtcagtgatgttgaaggtaaggcactgggtattggaaaggtcatccacacggacactgaagacaccaggattatggcagatttgggatggagagaaaattcataaaccatgtcaggaaatgatgagaacaacaagaaaagatggacaatggtgaatttgagaggcataagtttcaaaggaagaaggattttcataggacatttgaggaatattgaatgagcaagtgttaatggttatttagcacttactgtttaccaggttctgttctaagtgctttacatttacatttactaaattcatgtaattctcatctgtgaggtcaatactgtaactcccattttacaaatgaggaaactgaggctctgagacctttaataacttgcccaaggtacatagccatgtctaacccaggcagtttgtcatctgcaaagtctacactcttgcccatgtcagtcttcctgcttctgcccaccagcccagccagtccatgtggttaagtggaaggttcaagaacaagcagccgccacttaagagtacagggaggaggtagtgtctgaggtgggagccattcaaaaaactctgaccataaccagtctttgagagcatcacctcctttatgttttccagggtctaattcatttagtactgagacatgataatgtgcctttgaactatgggttaatatgtaaactgccccgaagccttttcagaagtgggtacagtatacttttaaaataaatggttacataattattaactataagtaatcaattacataaatgagttaatttgcatgttttagagaatttatatactcctctctacctaagaagtggcaaagaacaaacggaagtatacaaccgtgaattatacatagttctgctttttctctggcattacatactaaattttatgacaaatcagttcatgattattttttgaaagataatctccctatttttctttttgactttagttacctaccagacactgactatcttaaacaccgaagcacaagaatgctccaaagaagaggtctatattgcttggctcatattaacttctgtttattttcttacgattaaggctcaaacgttgttaaaaaatgttcaaatcctacaagacactgacatgccagttcctcagctttgatggagaaaccagctttctcttcttgcagagatactcttcatgaaaagtggagctccaagaagagtagacatgaggaaaatatgaatttttacaaaaggaaatgtatggtgcaattataaactgtagcatgaacccataattggaagtctacatctcacagttatagtcaagaattctggtacatataaaataagttctttcaaaatgggattcaggtattatttagaaatgcatctactgaaaagaagcataccataaaaatttatgctaattatggatgagatcatggacggtttaatcgaaattacgagttggatttgtcagatgtagagtctcaatcaggccacttgaaagaccaaatgatttccttttcatctgaaaggttcagagaggaagcttttgaaaagacactattgaaatcttcaaggtagctgttcctagcacagctttgatttctaaaataactagaaggactgtagacctacatgaggggagagaagagaaactgaagaattgttagaaaacataagttttctttacttctagtaccactccacgctttgtgaaaaaagttattttatgaagtcaagaagtcaatcagaagaaacaccagggaaagtcaacacaaactggtttatctaatactttttcagtgtccaatttgcaatgcactgagttccctgctaaactatgtctatatattgggggctgggagaggagtaggttaaaaataaataggagttgcaagtctttctcctcgggctactaataatatacctgaattttatgtttgattttgtcttccttgtctttatagtttttgcaactaatgtatatatgtctaaacaatctattgcttaaatttacataattttcagctttacatatgtagaatcatgctgtttgttttcttctgtacctcagtttttttcactaaaaattgtcttctgaaaaaaaaaagcggaggtatcatacttcctgatttaaaattatattacacagctatagtaaacaaatcagtatagtacttactcaaaaacagacacagtgaaacagaatggagtccagaaataaattcaaacatatacagtaaactaatttttgacagagacaccaagaggatacagtgggaaaaggttaggctcttcaataaatagtgctgggaaaattgaatttccacatatatgcaaaatttataaaatataagacctaaaactataaaattccttaaagagaacacaaaaagctcctggacattggccttggaaataattttttggatatcacaccaaaaaatggaaaaaaaaaaagctcaggctacaaaagcaaaaataaataaatgggactacattgaactacaaagatttgcacagcaaactaaataaccaacaaaataaaatgacagcctattgattgggaaaaatatttgcaaaccatgtgtctgataaggggataatatccaaaattaataaagaactcatacaactcaataataggaaagcaaatagcctgattttaaagtgggaaaagaacacttgtcgacatttctccaaataagacatgaaagtggccaacagatatatgaaaaggcacccaacatcattaatcatcaggagaatgcaaatcaaaaccgctgagatatcacctcacacccattaggatggctgttatcaaaaaaacaaaagacaaattttggtggagttgtggagaacagggagccctggtacattcttggtggggttatagattggtacaaccattatgaaaaataatattgagatgtctaaagaaatttaaatgagaaccatcatgatctgatcaagcagtccttcttctgagcatagacccaaagtaaatgaaataatcacctcgtaaagacatccacactcccatgttcattgcagcactattctcaatagccaagatatgacaagagcctatgtgtctgttaatggacaaatggataaactgtgatatatacatatacatacacatatagttctcttacactgaatgtatattattcaatattgaaaaagaagattctgccatttgccacacatagtgaacctggaggatgttatactaagggaaataagtcagacgcagaaagaaaaatattgtgttatctcgcttatttgtgaaatctaaaataaaaagccaaatatacagagatagagaataaaactgttgttatgggcaggggatagggagatgtaggtcaaatatgtgggctgaataagactagagatctaatgtacatcatgaggaatacaggtaataaaattgcactgtatttgggaaacctgctgagtagattttagttactcttgccacagaaacaaagaagaaataggtatctatgtgagattatggatatgttaatttgcttcactatatgttactatctatatgtatcccataacatcgtattgtataccttaaatatatacaataaaaatgtatttaaaaaattatcttctgggatttgttcatgttgaggcatgtaggaataattcatttttcatcactatagagtattacattttatgaatatgttataatttacagcataatttatttttgctttgggtgaatattgaaatttttatagactgttatttatttgtgtgtctgcttggctcttacaaacacgcctgccttgaacattcttgtatatctcctggtattcatatgcaaaagtttatctaggtttatctacctagaagtagaattgttgagttattggacatgggcacctttaactttatttactggataatgccagctcgttttccagagtactaatttatacagttatccttcagtatctgtggaggattggttccaggacttcctatagatatcaatatccacagatactaaagtcccttatgtagaatggcatagtatttgcatataacctatgcataccctcccatatactttaatctttaggttacttaatatacccaatacaatgtaaatgttatgtaaatggttgttacactgtattgtttaagagatagtgataaggaaaaaagttggtacctgttcaggacaaatgcaagctccctcttctttccaaatattttctatccatggttggttgaatccatgaatatacaacccatggatacagagggccaactgtactcatacttgccttctgttattgcttgagaatctctccaacactttttattatccaactttttaattattgctggtgtgattggtacaagtagtattttatgttattttaatttgcatttcccatatgtttgttgccagtcctgctgtctttctggaaaatgcccatttttgtcttttgcccattttttctattaggttgtctgtgcttttttcagtgattttgagttttaaaaattatcttttgagttccatatattttggagactaatccattgctaggtatgtatgtcacaaattggggtttattgatgaatagaattattcattttaatgtagttcaatgtattaacctttttctttatgatttgttttagatgtcttattaaagaaattcctacctattatgaggtaatttattctcctttatttccttctaaaagttttaaagttttgcctttcacttgtaagtcctttgtccaacctgaaactcgataatgcatttccaattaagttttaaaattttctccataattgccttacatattgagataattgtatgttttctttcttcatagtttgttaaggtagtattagagtaataaacttgagaacgtttaatcaacctgcattcctgtaacaaattcaacttgagcctgatgtacgttgggtaatttagtttgtgaatatttccttggtaactttcatatatattcataaaggatattaatctataattttccttggttttgatctcacagttattttagcccaagaaaatcttttaatgcttttatccttaaagtgtattctgttaatattagaatatcagcattacctaaattttattagtgtgtatgtatatgtgtatatatatatatatacatatacctacacatatgtgtttgtgtagtcattaagctgtacacttagtatttctgcatattgccatatgtaaatggtacccaataaagtactattgttgtttttaaaaagaacataataagcaactaagaaaacatggactattgagctaccaccatcaactttcagtcatggagaatggcaggtgaaacaaaacaaagacgcataaaccaaagcaaaattccaaaattctttcattttggaaacaaaaaactttcattaaaaaatttctttgatgttaagtctgttggtagaaatttcagtttttgtcttcaaaacgtttgtttataagaaactagaagctttcctgccaagatcaagaacagggcaaggatgtcccttctcaccactcacatttcaagatgatactggaagttctaactaatgcagtaagatgagagaagaaaatatatgtacagattgggaaggaagaaataaactgtattcacacatgacataattgtttatctagaaaatctgaaagaatcaacaacatcaaaaaaattcctggggccaggcacagtggcacatgactgtaatcccagcattttgtgaagctgagacaggaggattgcttgtggccaggagttcgagaccagcctgggcaacaaagcaagaccttgtttctacaaaaataatttttaaaattacccaggtgcagtggtgtgcacctgtagtcccagctacttgagaggctgaggcagaaaaaccacttgagcccaggaatttgaggctgcagtgagctatgattgtgccactgcactccaacctgggtaacagagcaagacccgtctctaaaaagcaaaaaaacaaaaatgacaacaacaacaaaacaaattaatagattatagtaaagttacggtgtagaaggttaatatacacaaatcaattgcttttctttacactagcaaagaccaagtggaatttgaaattaaaaacataataccatttatattatcttctccaaaaattaaatgcttaggtataaatttaataaaatacgtacaagatctatataagaaaaaccacaaaactgcaatgaaagaaatcagtgaaataaaaagatggagagatagtccatgttcaagtataggaaaactgaaaattgtcaagacatcagttcttttcaatgtaatctatagattcaacgcaatcttggtcaaaatcccagcaagttatttggaggacatcaaaaaactgattctaaagcttataggaagaggcaaaagacccagaattgcccacacaatatttaaaaagaagaatgaagtcaaaagactgacattaccaaattttaagacttactctaaagctttgataatcaagacagtgtggtatttggcaaaacaataaactaatagatcaatggaacagaatagagagctcaagattaaacccacacaaatatagccaactaatcttggacaaagaagcaaaggcaagtcaatagacaaaataatcttttcaacaaatggtgctggaacatctgaagagcaacatgcaaaaaaaaaaaaaaaagaatatgggacaacttcacatctttcacaaaaattaactcaaaataaattatagacctaagtgtaaaattcaaaactataaaactcctagaagataacataggaaaaagcctatgactttgggtatggtggtgactttttaggtacaacaccaaaggcccaattcttgaaagaaataattgataaattgagtttcattacaattaaaaacttctgctctgaaaaagacaatgtcaagaaaataagaagataaaccacagactgggagaaaaatatttgcaaaagacctatttgataaaggtattgttatccaaaatatacaaagaaatcttaaaactcaacaaaagaaaatgaacaactcaatttttaaaaaatgggccaaagaactaagcaatatctcaccaaaaaagttatacagagggcaaataagcatatgaaaagatattccacattgtatgtcatcagggaaatgcaaattaaaacattgaaataccactatacatctattaaaatggccaaaattcaaaactccaacaacaccaaatgttggtgaggatgtgaagcaatgggaactctcactcattgctggtgggaatggaaaatggtacaggccctttggaagactgtttttcagtttcttacaaaactaaacatactcttaacatatgatccaataattgcgcttgttgatattcagccagaggtgatgaaaacatatgtccatgtaaaatcctgcacatgaatgtttatggcaactttattcataagtgccaaatcttggaaacaatcaaggtctccttcagtaggtgaatggttaaataaactgtggtaccttccgacaatgaaataatagcactaaaaagaaatgagctacccagccatgaagggggtacattaaacgcaaattgctaaaatccaatctaaaaggctacatattgtattattccaactatagacattctggaaaaggcaaaactatagagacagtaaaagatcaggagttgccaggggttagcagaaaaggaaggctgaattggtggtgcacagaggatgtttagggcagtgaaactattctgtatggtggatacgtgtcattacgttcgtccaaactcatagaatgtacaacaccaagagtgaaccctaatgtaaactatagactctgggtgataacgatgtgccagtgtaggttcatcaattgcaacaaatatgccattctgatgccagatgttgatagtgggagaggttgtatgtgtgtagggttgagggatatatggttacactgtactttctgctcaattttactgtcaattttacaactgccctaaaaaatagtctttaaaattgtgtttatttctcctttgtttttgaaagatagtttcaatagaaatatctgaaaacttaagttgtaaacactttgagtattccactattgctgctgaaaaatcagctgtcagtttggcagtgttttgatggtaatatctttttctggcttctttaaagactttttttattgttggcattctgcagtttcaccatgttctttctaggtatgcatttcttcttatttgctttgttttcattcactttttttttttgcatcagagagtttgctctttcattcattctggaagattataaactgctgtctctctaaatattttgttttctttttctattgcctcctttaactccaattagaaatatgtgagactccaccagttagaatggtgatcattaaaaagtcaggaaacaacaggtgctggagaggatgtggagaaataggaacgcttttacactgttggtgggagtgtaaactagttcaaccattgtggaagactgtgtggtgatccctcaaggatctagaactagaaataccatttgactcagcgatcccattactgggtatatacccaaaggattataaatcatgctactataaagacacatgcacacatatgtttattgcagcactattcacaatagctaagacttggaaccaacccaaatgtccaacaatgatagactggattaagaaaatgtggcacatattcttaatgtgtgccatggaatactatgcagccataaaaaaggatgagttcatgtcctttgcagggacatggatgaagctggaaaccatcattctcagcaaactatcacagggacagaaaaccaaacactgcatgttctcactcataggtgggaattgaacaatgagaacacttggacatagggtggggaacatcacacacctgggcctgttgtggggtggggggaggggggagggatagcattaggagaaatacctaatgtaaatgaccattaatgggtgcagcacaccaacatggcacatgtatacatatgtaacagacctgcatgatgtgcacatgtaccctagaacttaaattataataaaaaaaaagtaagactcatggtcttgtcaaaaacagcttcctagaattacttcgtctttgtcgaaagccatagaaaatatatcctgcgtaggagtttttgaacttgcccttaaaatctgcctgaaccctaatcttcctgaattatcttctgctgttaaaagtcaattgcatagaatctgaggggatacaataacaaattataatgttttatgttgatgaattcatttgtaggagtcacatcaacttgattattgacaatatggatgctaagttttggatctctatgatgttatcgaaatgtgagatgatccagtctccttgttcatgaaaaatgatgaaaatgtgccatggtggaaaaggagtgggtagtgccactgatcaatgccatctgcagatttttaaaatatagtttttagaaatttgggccataacaaattaataaggagtttctagggcttccagtatatggcatggatacaacactaatttttaaaggagatttacaactcttttttattatttggtttttagaaggcatttctttactcattaataaaaagaaccactcatctgttcctcataggcataaacaatagggaaatggatagccttattcactgctgctgaatgtctccatctggatatatttgatagtatctcagggcaaatatttaaatgccactgcctcagtatatttcttaacattgggaaagagcacatcctgaatgagaccctgtagggaagtacctagtaacggtattcaggatggccgcctccgtttttgacagatcactttgtaaaataaataaaac

SEQ ID NO: 491 - DNA, 48978 bp, Homo sapiens
tagctcagggattgtaaatacaccaatcagcaccctgtgtttagctcaaagtttgtgaatgcaccaatcgacactgtatctagcttctctggtggggccttggagaacctgtgtgtggaaactgtgtatctaactaatctgatggggacgtggagaacctttgtatctagctcagggattgtaaacgcaccaatcagcgccctgacaaaataggccactgggctctaccaatcagcaggatgtgggtggggccagataagagaataaaagcaggctgcccgagccagcattggcaacccgttggggtccccttccacagtgcggaagctttgttctttcggtctttgcaataaatcttgctactgctcactctttgggtccacgctgcttttatgagctgtaacactcactgcgaagatctgcagcttcactcctgagccagcgagaccacgaacccaccagaaggaagaaactccgagctcatctgaatatcagaagggacagactccagatgcgccaccttaagagctgtaacactcaccgcgagggtccgtggcttcattgttgaagtcagtgagaccaagaatccaccaattccggacacaataggggacgggagagtaagtattgcactataacatagtcagggttctagatcaaataagataaagtgtaaagtttgataagggagactttagtgatatgggaacagtcattcatgatacaagttttcataccctgacagggaccctgggagtcagtactaacatgctttttaaatggctcttgaaaacttggaaaaagtgagacctccacattgctaaggtctgagtgtttgtgtccctcccaaattcatatgttgaacctagtcacccatgtgatggtgttaggaggtagagcctttgggcagtgattattagctcacggtggcggaggcctctggatgagattaatgccctcataaaagagaccctggataactgccttgccttcaccaggtgaagacacagtgagaaggcaccatctatgaaacaggaaatggggcctcaccagacaccagatctgccaatgccctgatcttggactttccagtccccagaactaaggagaaataaatttctgctttttataagttgcccagtctgtggtagtttgttatcgtagcctgaatagactgagacacactcacgtgaagcagaaattccagaatcattttaggcagtggaagaggggatttaaaatcataggaaaaccatcctggccaacatggtgaaaccccatgtctactaaaaatacaaaaaattagctgggtgtggtggcatgtgcctgtagtcccagttactcaggaggctgaggcaggagaatcacttaaacccaggaggcagaggttgcagttagccgagatcacaccactggactccagcctggtgacagagtgagactccatctaaaataaaaataaaaaatcataggaaagtgagcctgctagagaggatatactacataaacctggaaaaatattataagaggctaaaaaaccccccagctgactatgttttatgagagggtccacagtacactccatttaacaaaatgatgaggtataaactgttaagggggtcaaagtaatgctgagaagctcagtggtatcctctgtagtccaaggctgatattagaacagggggcctttacaggaatggagattatatgatacccaagtaattaaaggtcaggtggtggtgcagaaacaagaggatgtaaacataatgaatgataatgctacaaaatttataacatatgattattcccaagagtgaacatctcttttgtgagagtgactaaacagccagatagacagaatgattcagttagttggcatcaaacatccataaaagaccaccttcatattctatgacacaatggatataaaaatggaatagtcactgtgacagctgctctaacactcacctaggctgatttaactgctgctgttgcttctgaatgtccaactctgaacaatgcaaatcaacaataagatgagctctcagtatggcaccatctttctaacaaaacacacagccttttggtaaggggtggattaccttggacctctgcctccctgaaggggcactgatttatcttgaagggaactgtgttgttttgcctttcctgcttgcaggccttcatatagcactatcatctaaagacttgcaggtttacgtcattgacacaggattctgcataaaattatatcaaactaagagattaactgtaacaaaaggattgcagcagtaggcatgtgacataagatacacttgtcctatcacatactacactacccagaagtcccagtcagatagagtgacgggatggcttttacaggtgtaactgacaggccagcttggaaactataccattcaaggatgggcatgatgctccaggactcagtaaatcgatgaatataatttggtgctgtgtcccttaaaggaaaaacacatggtctagaaaccagggagtggaagtatgcatgaccccacttctcttctatgagcccaaatttgccaatttgggcttttgattcctgcagctctaggcattttgggctatagatcctattgcatgaagacagaacacttccaccaggaaacacagcaaaaacgtataaactttgttactgcatcctcctggttattttgggcctcttgaaccatgagccctgtgggcaaaggaagacattgttattctggcagagttaattgatcttgactatcaggaagtgggagggctgctgtttttcagtggaggttggggagaatgtatttgtcagctaggtgattcactggagcatttcttggtactcccttgccaattttattcataaatagaaaaatgtaggagccacagtctgagaatggcgtggtcaccagaagctcatgccacttagaaatgagggtctagtttatcccaccaagtaatacaagctaagagtaaagggattgaggaatgagtaatagaggatggaaacaatgagtatttttctggccattagcccagctgcaggagcggaagcctgtcttacaagttttcccaagcaaagaaaccagccagaatcctagaggagcttttaccatgtaggtgaactgagcaaagtaattagatctgagcaatacaaggggtggactgtagtgagggctattcattcaacccaacccaaatcttcctttaaagaagcaaagcacttgttttttaagcttctgggagctttgcctgatgaattttcagagctggattcttccataggacttttcctccatcaaaggatgctgccccaaaagtttgctctccttcctggggggctgcttctccattcaggatgtctctgaagagacttcacaggtttaaagctgaaacctctgctgcacttgtcacagttcaacttctccttttgtctacctatttctcttgctttgaagtgcgtgcccaaataaacctcctgcatgcaaatctgttttctggggaacctcgtctacaacacgatcttaatctagcatttatttttgtggggggtgttgtaaggatctggcattaattttatttcatgtagaaagtttagtgacccaaagccatttattgaaaaatctatcaaaaagcacattgaattgtaatgttaatagtattatatataaaattctatatacatgccttttgcctttctttttttgcctttgatttttagtctattgatctattgtttactcctatattaatgtcacattattttaattactacatatttgtaataaatattgttattgattaggacaagtctcctttgttcttttattttagatttatctcaggtattcttaggtcattattatgccatgtgaaatttgaaattctagtttcaagttttataaaaacattgggtttaaactgtgaatgaatagaatttataaattggtacaataaaaactgatagcttttaatactgaatattctcatcacttaacatgttacaaatatgtagagatatagtttccttttatattttccctttggttcttcctgtttttctatttttggatactcctacttcttttaatattacatttccattagttagtgatgccatttatttttctttctttctggattcattttcttttttgggaattctacccaagatcttcaccttggctgtctacctcatgaagacacacggtgtacttacctttcagcccaatatattctggatatcctgcttcttgcccaatggaagattggccaaattatgggggataataaagtcatggcaggcttgtaggatgatgggatataaaaggtaacataagttagattcacagatcatgaaatgccacatcatccatcactttttagcagctgtattgaatgtaaaaaggttattaccttgcatccatcctggttcctgaatattttgctgtattcatgtatagcagcccatttttgatttttcaaaaagtatttactgagcacagaaaaatagcataaaaccaaatagctgtcacctgcagtaaaataaaagatttctccagagatcctagtttccatgtaattttggagaagctaatattgttcagaattgatacgtatggagaaaaccattttctacctttctttttgatttggaaacaaaatcctcaaaggagtgaacatcagcacgttaaacagctgggccaggatttggtggcaggtattgccagaagcaaaacaagatttttttgttttttcttttttgctacactatcacagaattaacacatttggtgttttcaatctgatttttagtgtcagatgatgaggtaaatcttgagtcattactaaggtgctgaatcagaaaatatcttactgctatcttccttgagttaaagaacgctcggttttgaaatatatacatggctagaccatgcacagtggttcacatttgtaatcccagcactttacgaggccgaggctggtggatcacttgaggtcaggagtttgagaccagcctggccaacatggtgaaatcccgtctctacaaaaaatataaaaattagccagacctggtggctcacgcctgtaatcccagctacttgggaggctgaggcaggagaattgcttgaacccaggaagcagaggttgtagcgagccaagatctaaccactgcactccagcctgggtggcagaacaagaatctgttacaaaaaaagaaagaaagaaagaaagaaatatgtacacggctatgcaaattctgtcttaaatgttattttgaattccacttgtgattatgatggagcaaaaggatttgtacttacattcccatccaaaatcaactaaaaaattggacactatatggtacaactgttttcagacatgtaatagatggcagtttaagactatgattcctgaaagatgggaaataaaatcggtgagctctgccatttcttgtcccaaatgtattcttggaataaattacggggcagtagcataaaaaggggaaccagtagtcttgctgaattgaagatatgaagataggaattcaagaactttgaagtagccataattttcaaggaagagtactctaaaggagggagctaagcagagaaagagttccagaaatgtgcacaggtatcccttaaatatttgaatccataccattttacacatgctatagggcatgaggataggtaaagaataactcctaaagaaagaacattactgaggcactgtgagttaacctattctcagagtttatgcatggttggaaagtaaattcttactatgcagggtagagaggcctcactaagtgtatagggaatttaggaaagactccagatgatcataccttaatcataagacaaaatttgccctatagagaaaaagctactctaggcccatcagaaaaaagagattaaaaacaattatcaaaaaaacaagtaatatttaaataatttaactgcttactacaataaagcccaaaactcttcaagaaaatacaattgtatccaaatttccttctgtgataaaaaggatataatttccttctgcctttaatattttgatattagatatattatgattgtccttggttgattgataagagtatttaaactacaaacaaatcttataaacaagtatttcagtagtctttgaatgtgagtatatttttttaaatctgaaaagtgcacaatcattaaaacatattttccttaacattttatttgtaattaaactagaaaggctggacttctctttcaattctttagacttttttaatcctaaatttgataaaaaagctttcacaatactgttgaggtaactaaaatttggagaggctaagcaaatctattcctataatgttctttttataaaatgaagaagcaaatatttatgctaatattggccatttaggaaaaccaaagatactttaagcattaaaaaaaatcttaattgtttttcttagtttttagttttttagtttggggtctgaattagataaaggcaaaatcaaagaagggtttctaaaggagttaagatatgacggagtccaagtcacgaagatccaatggcaaaaaatagctataggaaatatcttttaaaaagtaatttataatgattatcatgaaagtttgttaaaattatttagaattgtgtcaaaaacatagagcattacaaaatatttggtaataaaaagaacctctgcaatctggacccaaaaagctttgcaggtttgactgaaagaaaacgctttaattttctttaaaatttagaattttagtttagatctctgcatattagccatgtaacaatttgcagtaaaaaattcacaagcctttttgcctcatgaataaactcatcatatttacttacctttgccaaaaatttcagcatattttgttcatttgaaaattatcatgtgtaggtattctattcccaggaaaatcacgttaacttctccttagacctaaagcattaaaatcctaagagctatgctctccaatgacaatgaaataaaattagagatcatcacagaagaaaatctggaaaatttacatacatgtggaatttaaacaatatgctcctaaataatcacttgaccaaaaaagaaatcataagggaaattagaaaatactttgagataaattaaaatgaaaacacaaaataccaaaacttattatatgctgctgtaacagtgcttagggtgaaatttatagctgcaaatgcctgtaagtaaagaagaaagatctcaaatcagtaactctctacctcaagaatctagaaaaaggagagatgactaaccccaaagcaggcagaaggaaggtcataatacagattaaagacaaaataaatgaaataaagaatttataaaagaggattaaaaataaataaatgaaaccaaaagttagttctttgtaaagatcagtaaaattgacaaacatttagatggactgacccccaaatgagagtagaatggggaagtcaaatcatttaaatcaggaatgaaagagaggacattgccatacatctcacagaaataaaaataattatgaggcaataccatcaagatgtctatgccactatttagataatctagacaaaatgaataaattcctacaaaaacataaattacaggtgacccaagaagaaatattaataggaaatctgaatagacttataacaaataaagagattaaatcatcataaatatccccccacagagaaaagcccagattcagatgactttggtgaattttcctaaacatttaaaggacaattaacacaatccttcaaaaacacttcaaaaaaatagaagagcgttttaattccccattttatagggctgctataaacgtgtattactacatgttgcacagatgaaaacaacagaaatttgctttctcataattcttgaagccagaagtccaaaatcaatgcgtctacagtgtgaaatgtagcctcaatgggagaagcattttgcttcttcagctcctggtggctccaggcattccttggcttttggcgactccggtgtctgcctctgtctttccacagtcttctcccctctgcctctctgtctcaaatctccctttccttatataaaaataccagtcattggatttaaggcccaccctaaacctagggtgtcctaggacaatctcatctcaggatctttaactgatatgtgcaaagctcctgtttccaaataaggtcacatttataggtgccaggaggtaggactcagacacatctattggggagccactattcaactcattacaaagaaggaacatttcctgttattctatgaggccagcattaccctatatcaaagccagggaaatagatcagaagaatagatcactacagaacaatatgatatagatgcagaaatcctcaaaaaaataccagcaagtaaaatctagcaacatatataaaagattatagaacatgaccaagtggaatttatccaataattcaagactggtttaaaaatgcaaaaatcagtatgtaataggctatattaaaaaacacatgatcacctcagtatatgcagaaaaacatttgacaaaacaaaacatctttctgtcataaaagcactcaacaaactagaaataggagagaacttcctcaatctagtaaagcatatctacacagagactcacagataatatgattcttaactgtggaaaagtgaaaactttcaaaagtcaggaacaagatgatgatttgtattaaacacagtattaaacatcacttatattaaacattggaccaaaggtagtaggcagtataatggccagaaaaagaaaaaaaaaaagaatccatatttaaaaggaaaaaaaagtaaaactatctttatttgcagatgacatgctcttgcatataaaaaatcccaaggaatccactagaaaactattaaaactaataaatgagttaagcaagtttgcagaatataaacccatatatgaaaatcaattgtatttctacatagtaacaatgaacaatttaatttatgatagcattcaaaaagaatacaatatgaagaatgaatttaacaaaagtagaatatgtccacactgaaaattataaatcattttgaaaacattccatttatactaaaataaaaaaaatcctttttcatggattaaaaaacttaatgttgttaagatggtaatactctctaaattcacctcccagttcaatgcaatacctattatgccaggtaacttttcttaacagagatgaacatttggttccaatggaaccaacccaaatgcccatcaatcaatgagtggataaagaaactgtggtatatatatgcaatggaatactactcagccataaaaaggaatggattaatagcatttgcagcaacctggatgaaattagagactattattctaagagaagtgactcatgaatggcaaaccaaacgtcatatattctcactcataagtgggagctaagctatgaggatgcagaggcataagaatgacacaatggactttggagactcagggggaaagaatggaaagggggtgagggataaaagactacaaattaagtgcagtgtatactgctcgggtgatgagtgcaccaaaatctcacaaatcaccactaaaaaacttactcatttaatcaaacaccacctgttcctcaatcacctatggaaatacaaagtgtttttaaaaatcatacagaaatttagggcaaccagaataacaacacacacacaaatccttgagaaagaacaaagcttgaggactcacacttctcacttcaaaacttgttgcacagctataatagtcaagaccccgtggtactagcataaggataatcatacagatcaacggaatgtaatttagactcctggaataaacccttgcatttatgaccaactgatttttgacaaaggtgtcatggccatttaatgtggacagaacagacttttatcaagtgattctggggaaaatggttatccacaagcaagagaatgaacttggacctctctgccttacaccagacacaaaaattactcaaaatgcatcaaagacctaaatgtaagtgctaaaactacaaaactcataggagaaaacataagtaaacttttgtcactttgaattatgcaatggtttattatatgttacaccaaaaacacaagaaaccagagaaaaaaattgggcttaattaaaataaaaaacttttgtgcttcaaacaatacaatcaagaaagtaaaacaataactcacagaatgggagaaaatatttgtacgttatttatctgagaaaactctagtactagaaaatatagggaactattataattcagcaataaaaaagacaacccaattttaaatggtcaaaggatttgaatagccttttctccaaagaagaaatacaaactcctagtaagcacatgaaaagatgctcagcgtcattagggaaatacagattaaaaccatatggagataccatctcatacttacaaggatggttaaaatgacaaagataacaacaagtattagtggagacacagagacattgtaatccttatacatggctagcaggaatgcaaaatggtgtagccactgtggaaaaagtctggcagtttttcaaaaggttaaacacagagttaccatatggcctagcaaatccattcttaactccatacccaaaagaaatgtaaatattttgtccacacaaaaaccattacactaatgtttatagcagcatgattcataatagtcaaaaaatggcaacaacctaaatgttcatcaattaacacatggataaacaaaatgtgctatatcaatacgatgaaatattatttggcgtaaagaggagaaattaaatattgacatgtggtacaacatgaataaacattgaaaacgtcatgctaagtgaaaaaatccagttacaaaggccacatactgtgtttgcttttttatacagaataaaatactaaaatacttatactgagaattagacaaatctataggtatagaaagtaaactagtggttgcctagggctgggaggagggaaatatgtggagtgactgctcataggtatggggtttctttttagggtgatgagaatattttgaaattagattttggtgatgattgcataattctgtgaataaacaccactgcattgtaaaattttaaaaggtgaattgtgcagtaagtaaatgggatctcaataaactagttgtttaaaaaggcacaggctctgcccctagagtttgtgattcaagtttgggcaacactgaggctaaggtgatgtgtaaactgtgggaatttttgtgagctattaattatgctattgtgtcttcagaagattgatgtcaaaatgcaaatatagtatctcagaagaggaagataataaacaccatcccacagatatgaattaaattatgaggttcctgtccatcctgtgggctctgagggactgaaagccagtcatgagcattttagtggagaaagtgggagaaatggctgacaatggggaggtaggaagtgaagagacctagaagggaaatttagcaggagaaagggactccaggaatacataagtacctgaagctcactgtttgtggactaagcctggctatctctctcaacttaagcatcaggggaaataatgatagttaacatttattaagcacttattttgtagcaggaaatgttctatgtgctttattgtgtactaacttgtcttctccttagaaaacccatgaacctgatccaattattatttcaatattatgaaagaggaaactgagtctcagagggatgatcatgtatcaaatcacgtagctaatacagggatcactggcgatggcagagggtcgaaggagaggctgccagctgtcttaaccctggcttctaggggccatgtcaaggctgtgtggtactgcagagaagttgaggaatgcaatgtggtggtggacacaagcattagacatggatttgggccatctggaatttgaattctgactctgctacatattgactgggaggttgggacatgtgacatctctagattagaatttcttcatctacacaaggaaaaaatagtatctttcctgccttccccactgcctaatgatgaaatttaaattcagataatatgtctcaaaagcgttaggaacaattttttaaatataaagtaaggtagtagaatgccaacaataacaaatgtaaacaatagcagggatccagcttttagatataatgattcctgaagattcctggattggtaaagagatctggccaagaaaatctgaccaatcaatccttagagtggagaagtgttaactgcagttaagaattgcagtctctcaggttcttctataggcatctgaggagtagctaagccccatttgaagtaattgatgattaaataaattatattcagaaaattattagatgttttattgaaaagattgagagaagacaagttaatttggagtacactcagccaatggagctctcatctctaccccacatcaacggctgagcagatcttttaggagcctggctgcggcagcagctgctgcctgggtgaatgggctccgacaaattcacccatctcaatagctcagtacaaattggaatgttgctcttgagtcagttggggtccattttttatgtctgtgttatatacagttaaatggcaagaggaaagaggagaaatgatttgattttgatttcaactttctctgattaggggttgctgaaggactttttctgaatgcaccattaggatagctgacagatgtcttcttaccatttgtacagaaatttagagaacttagcaaagtgtgctcaatgactttctggtagatttcgtagcatctgaatgtgataatttaacatttgtttagttagggtatccttgttttgaaatggtggtgaaagaaggcgctgaggctcattttgaaggagagttgctttggaatatggtgacaagctgataaactaaaggtcagaactgtgaccagttgatcattaatttgttctcgcttctgggaggaccagatcctacatatttacagcagaccttaatgctgatgatttgagcaatgaaaaatgtctgtgattttagttctgcatgcagaggctgtgatgtataagggaaaaaagtgctgagttgggagcctggaacctgggttcttactaccttttaaagcccaaatgagcctctatactcctctgcatctctgtcttcctagctggtagaataaaaactgagagagagaattctgggcttcttaaggaattttttttcccaaaattttgtttgtttttttttttttgttttgtttttaattgggctttttattttctgcctgggctgaattcatcaatcaacaggtcagtgtaattgaaaataattttaagaaataattaagagaacacattatttcctcaagtaatgaaataactgttttgttctaatcacagtggatcctcatatctgtgaataatgagggcgcttaatagcattactactttatattaatcaaatatatcgttacctcaacaaacaaagatgatgaatggcccctgtccctggaaccttgcatcctacacgtaatttgtcactcatgctagctttgtcactgttgagaagtgaatgtttctgtgttcttagtcctgcttcttctcttttgagggactccttactaggtccttcccaagggagggataattactgattagattctacatgttctggacagagcttagaatatgccttggatcttgttttattagttggttgggtggttactgtgagtcaatggttggagcttgtgtgaggccttctcttctgttttcctaggagggcctgaccaggttgctttctctctttttatttcttctgaagataaaattgagcatctaagcttgttaccacaaagcggccccaatctagatcccaagagagagttcctggacctcatgcaagaaagaattctaggtgaggctatagagtaaagtgaaagcaagtttattaggaagtaaaggaataaaaaatggctactccataagcatagcagcagcctgaactgctcgactgaatatacttatagttatttcttgattatatgctaaacaaacggtggattattcatgagttttccaagaaaggagtgggggctttctggaactgagggtccctccccttttagactatatagggtaacttcttgacattgccttggcatttgtaaactgtcatggtgctggtgggtgtgtcttttagtatgctaatatattataatgaacagtgagaacgactagaggtcactttcattgccatcttggttttggtaggttttggcaggcttctttactgcgtcctgttttatcagcaaggtctttgtgatctctatcttgtgctgatctcctacctcatcctttgagtaagaatgcctaacgtcctgggaatgcagcctggtaggggtaggtctcagccttattttacccagcccctattcaagatggacttacatcgtttcaaatacctctaacaaacagattcatactcctttggtttctggctttttatccttcataggccgagcccttccaggcatactcaagattcaatttcagaatataagagtccaacttagactcaagtacgtgacagatactccaacttggctttcaccaaaaggctctactttggtttggcagtatcaaatattatctcacttattaataaatacttgctttcccatatgactagtcctcctttcctagagtccccttgtgagttcccagggacggagatgtgagtaatatctcaggacttggatattctcgagtctctaacatccttagaataaaatgaaacctttttttagaactcttaacagcaagtgctgcacaccttgcttgacagacatacttttgcctaaattaaaatggaaatcactttgacctggcactctctttattctcttctcttccaaaccatgcctcttactgttttcgtgaccttggcctttaatgtcctcatttacaaaataaagaggttgaactaaatcctttccaggtcaccttcaatcctcaacattctttgatacatactgaaaatgtccctctgtgagttcagagcctgcttagatacagcattcatttttatttttaatctttcctctaaattccgttttgaatccaaacctctcttcctccttctctctctgcctctgtctctctgtctttctcagcacatacacttaaatatcagtgaattaaatacattttctgtgaatggaaaactggaagaaaaaaacagggtaaaacaggcctcatcatatttaggaggccttttaaaaagcaacttcaagccaaatctcctggtgttagaggaagcacatcaagcagcctccaatctgcctcatttatagccttttcacataacccagggtatcacattttttaaagaatgagccgtgctgcattctgaaaagagcttaatgtttctgtgaataacataattaaaaagaagattcacatcaatggcttaatctgggccattgctttatgaagaagttcagaaagaagtatttattaaggaggcctgtggggaggatagcttgatagtaaaatataaaaatacagcttgtctttggaaccagaggttacacaattgcagagggcagctgctgagtccagctggaggaaacagcaggccaaatggacagaagaaacattgcatggagaaaaaaagagtgaaatacacaattcagtatctcagaatgagtacattagctacaacctccatacctatatcgatgaagaggagagtttgttagagccgtcagcatctgtaaaataatagagcaaccaagggaatggaaatttagcacctgttcctatgtaggtctctggtacaaagtttcttagctcttctgcaactttcagctaggtagtacaaatctcatcttacagacaaggaaatggaagcttgaagaggttatagaaagttaccaatgttacaaaatacataagatttaacttttacgtgtctgacctcaaagactgatctcttgacattattctacttcctctacattagagagacagcctaggtaggaagaggtactgcactttctactaggctaagaggagttagagagcttgattattccaggtctacctttgtaatacaacaccttcatagaagctaaaaatagagctgccaaataacaggattcttctttctgcttagccatggagctttcagagattagaactctttgtattgtttgtgcagatactcaataccaccctcatatacttgaggaaatatcctttgctctgacaaatccttctatggtttcattctataatctccgttaagtgcctagtgcttggtgtatttttgctgtatcacctcaggtgagagagttgggggaagggcagtgagaagtggtggaaagcaagccaaactgttcaccaactcttatcatcatcccagagaagcatctatttcatgcacacattgtttggtatacattattcatggaatcacccatgtaaaacaatgagctctgaaacccaaaataatcatttctattcacacatcaaatttgtcttccaattctaattattatttggagaacctaagggaagtagaatgttggtgtttccctaatttttctttgtactactgggagaccattctgtatgggtcattcatttttctccatgcctaatgacagaggcactaactgctctcttattctgaactaccgtttggtgtttgtatagcaaagagccttggaaaacttgtgtctttctccaaagcagagggcaggcgtgcttgctctctagcaaaagatatagtctctttctagagcaaagaagaaatatgcatatgccaattgtagaagattaagtttcctttcctttactgcaaaccactttgtgtacaggaatctaggcccactcatgtcatccctgtgggacatgagagtaggggaaaagtgcaaatatgctgatgttcatgctgcttgctatactatgagtaagaaagtcctttgtctctgactcaggaatctcgtgtcttctgccagcatccatgaactgctaatgctctgtggcaggctaacatgttaacttgcaaatagggtaaaatttcagacagttaacaattattgatgaggtgctataaggatgagatgttgacagagatacataactgaaaacaatcttaacactcttctcccttcacttcaaaaaggtaggagactggacaaggaaatattgtgatacgataattcctatgaccttttaaaaatatgtctcccagggccaggtgcggtggctcacgcctgtaatcccagaattttgggaggccgaggtgggcagatcatgaggtcaggagatagagaccagcctggctaacatggttaaaccccgtctctactgaaaatacaaaaaaaattagccaggtgtggtggcaggtgcctgtagtcccagctactcgggaggctgaggcaggagaatggtgtgaacccaggaggcagagcttgcagtgatccgagatcccgccactgcactccagccagggtgacagagcaatactccatctcaaaaaaaaaaaaaaaagtctcccagaaacaaaagttttaaagatttagattgccttctgttatgattattgcatttgaaatgggctctgtgtagacttaaaaaatcagtttggcaatgtaagtaaattaaagaaattctcttgggctaaactcttacctaaagccaagttttatctattgtttagtaggtatatattggtgtttgtttaactgaattaaacaaagcacattttgcttaattcaatacacacatggtacctatggccagtacataattaaatatttacaaaatttatcactttgattgggagggaagcaactagttttttagatagaaaaaagaggaaaaaaccagtgggctatgaaaggctaggaaaatataagtctgagaaagggcttcaagcacaaatgtgatttaaccataaaataatcaagtttcccaaagaacacacaatttctctgaaccattcttatcaattaacaacaggaagaaggggatgatgctacaaatgcaccatatctacaaatgtgatatacatatgtattcttcataattgcagagttagatctggaagtgttatctaggcctgtggttgtgattgataagctagtgccaagccagctggcattgcagacctttagtttagaactgcaactcttctttgcacagcctttctgttctatttgtaaatctgcacctttgcttggagtctgactgcttgcacttggagagcatttttgctagtttcatccccagcaggcagctaatacaatcccaaatggcctcactcttcataatccttctaaggccttctgtataggttaggacttatcacaagagctttacttgattttagctgctgtttattattattttcattgtcatttatgctaatggattcattattcttctcattaatttttatgctcaggaactgagaatatcccatctgtccagactgtttttttaaactttatatatcacaagttatatatatatgtatatatgtatatatatatatatgcacacacacaaacatatatacatatatgtatacacacacataaacttttcatatcacaaattatatatatttgtacaataaaaatgcctgggtacccatcaaacagagcaagaagtaaaatcttggaagccttcctcatgctttcttccaataagtactcctcccttctcccaaagacagtcaatatcttgacttctcacaccagagataaatttgtccttttttgaacttgaacttgacataaacgaaagcagacattatacattattttgtgtctggcctctttgaatcataattatacttatgagatttacctttgttatttcgtatagtcattgttgggttacacatgcacacagataccctccaccatgtgttatatattctactgttgatagactattggcttgtttataatatttggctattctgaataatattgctatgaataattttttcacatgtattttgcagcaaatgtgcatatcactttttggatctaactaagtgaagagctgggtaccgtacatatgtgtgctcactttagtagatacaaatgaatagttttctacagaagttaattgccaacaccatatggtagttgcacctcccggttgacactcaatattgtcagtctttcaaattttcttatgtctaggtaataccacattgtgatattaatttgcatttatttggtggttaataaggcctagcatctttctgtttatttggaggccatttgtaaattcttctttgtgaagggcctgtttaaaaaatgaattgttactttcatattaatttttaagagtttattataattctggatttgagtcctttgacataggaaatggaaatagcttttcccactctgagtcttgcctttttattcttgggatggtgacttgatgagcagaagttcctagttttaatgtgaaacaatctattaatttattcctatagttagtacttgttagagtcttattgtttggagactttccccactccaaggtcatgaaagtattctttatgttatcttctgaaagatttctgatttaacttttcacatttaatctacatttcacttaatttttttattgaagtagagtcaagattaattttttccccatataaaattccccttggcagaatctccttttttagaaacactattcttcccccacttgtcataaataaagtgtccatatgtgtgttgatacattggcctgttttcccatccctgtgtcggtactgtttaattaatataaacatacaggttttaatattcagtaatgaaaatacttctttgttcattaaaaaagttttattatttttgtctgggagtggtggctcatgcctgtaatcccaacactttcagaggctaaggcaggcagatcacttgaggtcaggagtttgagaccagcctgaccaacatggggaaacctcgtctctattaaaaatgcaaaaactagctgggcttggtggtgcgtgcctgtagttccagctactcgggaggctgaggtgggagaatcacttgaactcgggagtcagaggctgcagtgagccgagattttgccactgcactccagcctgggcgacagatcgagactccatctcaaaaaaaaaagtttattatttttggcctgttgcacttctttatgaattttgggatcaatttgttggtctccacaaacaaacaaacaacaaccccaaactgatttttataatattaagttttctaaatccatatatggcatatccttccatttacttattccttctttaacttctctcaacaatatttttgtacatgaatacagtggtcatgtttatttaggaaaaaattattgccggatatttggtgtttcttgatgctaagttgtatcatcattttataactttgtttttcaaaatttgttgttattgtatagatatatcagtgagctgttaacacaatagtgctccatagtgaaacaaaacaaaacttagtggcttaaaaaacaatttattctcatagatctgtggttcagttggggaagctcatcaaggcttagctgggcagctttgcttcaagctacaggtacagctaagcctggttgttgtgactatgtgacacatgctttttctgagtcctagggtaaagtaatgtattttcattgacatggcagacccaaaagatggcaagctcaattgtataagtgcatctcaaacttttggttgcatcatttctctagtattccattgactatgtaaaatggtccagctcaaagtcaaggtgaaggaaaggtacttcatccatgaaacagctataaatagtcatgaatgtaggggagggtgaagaatgaagacgagtaattcattttactataatagtgacacaatatgtctttctatgttgacctcatgtctagcaactttggtaaattcattttaataattatagtagtttgtgtgggggtgtatttggaattattgtgtatacagttgtgttatttacaaataatgacagctttaattcttctttcccaattcttatatctttcatatttgtccttgctctattatactggctaggacctcatacacaatgttaaaaaaaaagcagttatagtaggtatccttgctcattctccttcttacgggcaagtttacactattacaaaataactatgatgtttcacattgggttttggttgatgttatttatcagattaagaaagcctatttatttatactttgataagatttttaaaacattattcatggttattgaattatgtcaactgcctatgcatcgattgaagtgactatgattttctgccctttattccttacaggggtcattattgacttgtgaatattatattaaaatccttttcctaaaacaaacacatttggtcatataatacattgtctctcttatataacaatcgattgtctcctaatgtttgtttactatgtttgcctctaagttcataagagattttaccatgttatgccaaggtatatgtttttccttgtgtttttcctgcttggtgtttgtagcttttcctgaatttgcggcttgatatcttttatcagttttaaaacatttttcattattagctcttaaaatattggtgtcgtgccattctctctttcctctctttctggaactccaattacaagttagatccttttttcctatgttctcttggtttcttacactcttttctgaatttcccatccttatagctatctattcttctgtctgtccatttttataatggcttatattctcatttattactgttctctttatatctaatttactattaatgctctttattgagttatttcagttataataacttcatttttagaatttaattggatttctttaaaagttaccagttcacctctgaaacttcccatctttcatctaatttattgaaggtataaatcacagttgctttgaagagtgtgtctctgataacctcctatggtatgtttctactttttctttcacttctctttttgtatttgtctttgtttggtcaagttatctagtctcctgataatgctgataatttttaatgaaatcctgaaataattgtagagataatttgatgctctggaagatgttgtcttcctccagcaaaaatttatttttccatctagaaggcaggtatgtattgttttaattcatctaggaactgaattgatttaaagctctttatgagatctgccctatttttgctccattactacttttagagtataaatattctggcctctcagctgaaaactttggttgtttaccagagactattctactggaattgccagatttcacagaaacaaacaagagtgaacaaaagcccaaacgatacaaaaagaaagctcaattaattttgaactttgaattgcaaatgtttattaggacatacttatcctgaaaaagtattttttttcctgaaattcaaagctaacaggcatctggtattttatctggaaactctatgtcaatttcccatcagtcaatcctgtaagactcttgaaacttcttcccaggttcttctcatctaccagtttctatttagtttatagtcatgctttggaaatggcaaaaacctcaaggggaaatatggtgctgaatactgtgttcacccttaagcttcttttctctcttgatcttgatcccttaagcctttacacaatagcagctctctgatgacttccagacaagttattttgttctagaaatcagcaattaaaatagacatcctatgttgtccaggattcaaattttaggtctacttattaaaaatacaatttttgatttgtattaataatggtagttacaataagagaagataatatattgcacaaaatgtatgcctggtgacatttcaattattttacatgaattgactaattgtcacaaatactctttgaggtagatactattgtgtccatttttcagattgagtttcttaagaacctgtatgggatgtctgttaaaagctaaggagcacaggcacaaaatatatagaaaacacctactgctctgagttaacatctaacttggtgcctagtacgaaataatcaccctataggtaataatgatcactggacagtttgccactaaggtggcacaaatcacattggttatttacacttaattggcattggtaaagtctacctcattcagaattccagtccttaaatgttattctacttttgttgtttccccagacaattttggaactatgcttttcaaatcttgttttagtagcagtagcccaataaccgaagcacacaacaaatttacaagaaaaaaacaaacaaccccatcaaaaagtgatggggatagaatagacacttctcaaaagaagacatttatgcagccaacagacacatgaaaaaatgctcatcatcactggccatcagagaaatgcaaatcaaaaccacaatgataccatctcacaccagttagaatggtgatcattaaaaagtcagaaaacaacaggtgctggagaggatgtggagaaatagaaacattttacactgttggtgggactgtaaactagttcaaccattgtggaagacagtgtggtgattcctcaaggatccagaactagaaataccatttgacccagctatcccattactgggtatatacccaaaggattataaatcatgctgctataaagacacatgcacacgtatgtttattgcggcactattcacaatagcaaagacttggaaccaacccaaatgtccaacaatgatagactggattaagaaaatgtggcacatatacaccatggaatattatgcagccataaaaaaggatgagttcatgtcctttgtagggacatggatgaagctggaaaccatcattctcagcaaactgtcacaaggacaagaaaccaaacaccacatgttctcactcataggtgagaattgaacaatgagaacacatggacacaggaaagggaacatcacacactggggcctgtcatggggtggagagaagagggagggatagcattaggagatatacctaatgtaaatgaggagttaatgggtgcagcacaccagcatggcacatctatatatatgtaacaaacctgtacattgtgcacatgtaccctagaacttaaagtacaataaaaaaaataaattttagaataggaaataaaaagaacaaaatgtagatacaatctactaatttttgagcaatggcttagtagtttccatggtgacatgaatctacaaatataaattcaagtgaggcaacttttacttcatttatcagaagaaaaagctaaagagaattttattttaaattacctgaataattatctcggttatttccttcatgttgcatacatatcactgatcgacttatctcctactattcatctttgtattttaaaaaatctaaaaatttgctgcgtgcattttagaagactaagtatctttaatttaacatgagattattattatatcttgatgttaaaaaagctttcttgataactaaatagtgacttggttatgaaacttgaagagaattaagctcccagcagtaagatatttttctaccaaaatttttgaaagaggaatatgagtgcattcgagattttacatctgccctatgggaaaatcgataatggattgtttctatatattatgtgtcaagccttgcctattgagggatatacaataggtatgcactggagcataatttacaaagtacgtttacaaggtatttccatagtgccctaacctattacagtttctgtcttctaattttcatgaggcttcgttgtgcatcttattttctatttagtgaagaaattgagtgattgattatagatgataagtgaaaaatcagtcaaatgtggacaaggctggcctgataagactgaaatgaagtatgcttttggttgtgtaataatttccagctgtgttctagtttaagaaaatgtccaacatgacactcctagcttaactcagtcacacatttcatacaggtagtatttttcagatgacaccaacttagaagggattgctaacacctcagaagaaaagatcagaattcaaagtgacctcaataaattgaagaaacagcatgaacctggctagccagaggccctacagggaaaaatatctaagctagtattcatctttcatttattttttcattcattcataaaatattaattgaatgcctactatgtgccagctacaagctgaatattgtttaacacaaatgcatttttagtttagcaatctaccccctccttcaatgcatggctggaccctttcaggaaatcagttccttccaaaattgtgtgctcctacatcatgcaaaatcaatagatttaagagaaaaaatacacataggtcaaaaaatatgacatcataccatacatagatatatatacttcatatatacatatatacccatttatagatagatacacacacatatacacatacatctcattcttttttaaaggagagtcactttggggggacaatgtaagtcatatttagtgtttaattgcgggtctctatagggttataataaaagtaatttaaaatattaaaaaaaagttatctgctagttgaagaagattagggtgacactcaacccactcagtcatttttccccgtcttcattgtgcacttgaaagcatctagggtcctgaagttacccatattttttgaaagaatttccaccctcactccaacttgattattccagaaatttcagcaatttggggaaatgagttgaggaaacagctaagccttttttttttttttttttttttggtgagacggagtcttgctcttgttgtccaggctagagtgtagtggcacaatcttggctcactgtaacctccgcctcccgggttcaagcaattctcctacttcagcctcctgagtagctgggattacaggcccgccccctcccccggccaccacgcccggctaattgttgtacttttagtagagacaggcttctgccatgttagccaggctggtctcgaactcctgacctcaggtgatctgcttgccttggcctcccaaagggctgggattataggagtgagccactgcagcagaccgcagctaagctttaagatgtaaaggaacttattattggtcccataacagataacttcgatttttctcctaaacttgagagtttccagctttggaacattgaatctgtacttagttctagtgagggaagtagccaaaaatctattacgaagtcttcaaatgaactgcaatcctcttgagggcccaggccatgtgcttttattacttggcagcattgccctgcagtgatggccatagtggcactcatttttgtcaagaacagaggaagagcttggaagaggatgaatttacatggctcaattataggagcaataagtatgaattcaggaattcttatcaatgtattatgtcactggttctccagttaatctctaaagggtgtcgtgcaatccctggacagaaaacaaaatttcttttatatttatttaaaatgtagaaaacagatgatacaaaaatcaaacagaaaataatacaggtttataaccacaaaatgatgaatagtttcaaaaaacagacaaagagacagcataggtgagagtttttataggaaccgtgaaaaatgtttgcatagaaatctacttctgaggggaatagaggctgtatttttcagaaaaagaaaatattgtactgtctaataatactttacttctctaaaaacatctgttggctcaataggaaggaaagaaagtagagaaagaggaaggcagataaaggaagaaaagagtcagggaaaatatttagaatctgcaatgagtctcacaaaggcagcaagctgataatgagaaatcatcaaagcagaggtgacttgaagtaatagatgattcaagcaggctggtttcagctgaacattgatataatcaaaataagggcgatatcgtgaacatcagtaagagaaaagcaattgtgctttttatctaaaaagttgtctgtgcatatagggcctaaaatgctgagggcagagccatgtgttttaggcagtgttttccagagaggcagaactgacaggagatacagaaagatatatgagaggggatttattaggagaattggcttactcaattatggaggctgaggatcccacatgataggtcatctgcaatctggagaactatggaagccagtagtgtggttcagtccaagtccagaagcctcagagctaaggaagccaatgatgtaactcccggtttaaggtcaaaagcccaagagccaggtggaccactggagtccaaaggccagagaacctggagttctgacatccaaaggcaggagaagggcatcctggctctggaagagagggcaagaattcaccatttctctacctttttgttttatctgggctcccagttgattgcatgatgcctgtccccacttagggcagatctccagtcatttcacaacttacaagccaatctctggaaacatctgcacagacacacctggggcagcctaatcgttcaaatcaaaagcaaaagcgactgggcttttcttttagcagacgagtaacaggctcagcgcctactgaaatgttaagaataaataatgctttgaccaactatctgggtatcctttaatccagtcaagttgacaccccaaatcaactatcatactgtggaacattgaacgtatatcaaatatgattgtgtcagttagccaattacatttttatgaggcagtttgttggtgatgaacatggatttggagctagagagacctggatataagacccagattcctgcatatgtcttctcatctctaaaatggaaataatataaagttcatcttatggctttttatttattttttaagtattgtaattacaaaccagagtaaccaaagccacaagcttgtttttgaaaacaacatcctgggaagcaaaggctggatctttaacaccatatagagtggggtccctttctttctgctggtaatggggatatcaaagtcaatataccatcgtccttaaaagacttctagcaataatgcaagaggttatgactgtacaaaacttttcatatttaaagtacacatgttctgaggcatgcaaaagctagatacaaataaaaatgacagatgtgtcaaaataaaacagtggagtcaaatctgtgctgaattctccttgtttttttttcatacttttcgatttcttactcaacagagcattttaaagtgaactgcatccaaacagtacaatttcagttcatagaagccaagaaaaataactctaaagagcaaagagttccacctcaaaaagtaaaaagccacttaggggaaagaataattctacttgaaaagcagattaaaataaaaaatcagaaacaaggccaaaacgtaaatttatttcctcaggcaaactctgtggatacgtttcatttaactttctctttcagtaaaaaatgaaattggccaaagagatttgctcttactcttaactgtaaggactatgattttaaatggacatttgctatcatctttgaggaattctggcatgactattatttataaatgtttcatttaacaaataaggcatagacaatttcttttgtctgcaattgctccctttgcacctacctataagttataagggaaatgttgatattgtgtttgcatcattggagtcctcctctcactaaataagagcatggaaagtcaagagtattattttaaaaggttacagttcaagagccccttcatttctcagatttgttattggcatgagccaagaacaattcctccagtttctcagtatgagacggaagaaattgctatttagcttgtctctgtagcccaaggtcatttcccagactgtggtatccaatttggattgttctgtaaacagcacaaatgttaaccaaataataatttatacaatggcatgcattaggacagataaaagagagaaagctgatgccaaagaaatagctacatagctggtcattgtattttcttctctaactcattctgggaatattaaaaagtggttgggagtaatgtcccaatgaaaaaataagtcttttgagcaacgtgattagctatcttgtaatacaatattcgagtacacaaggataaacgtagttgggtaaaatacatctcactgtcttttccaaatgtttttttccctaagtgtgctttatctttgatatatttctactacctcctgttgctttcaagtcacgatttttaaagatttctgtttacaagcatctgttagttaaagtaatgctaactgtagtaacatgcgaaccctcaaattttatccttaatacaaattgattgctccttacattcagtttaaagtagctgttcctgatctaggcaccttccgttttgtggctctctgatctttatgtggcttccaaagtccctacagaggggaaagaccatggagaatcacatttggaaagtttcattggccaggcctgaaagaggcacatatcatttcagcgcacattccatggctacaattcagtggcacagcacacaccgctgtaagggagatcaggaaatatagccaaactatttgcctaggagtttaggggaaatggactggtttaacagatatgtcaacactgccaccaagcatttctaacttgagatgagctaggaaaactacattttaattatttggggagggtttaaaaattcctggctgaattaaaatgacagatgaattattgtattttaccaatgctctcataggtttctaagaacacatgtattcctaatcaaaggaatttaccaacaagtaatgtcatgattattatgagagcttaagctcacttagataggaagctgaataatgtagaaaagtcaaatattctgaaacatacacaatttcttgaaaaactcttcttgaatcaaaacccaatgcacagatgtttcagtaaaatattaatagatagttatgacttttaaaaccttataatttttattacaaaacctgtgtatctaacttctaagccaggcccctgacagaaacaaatttcataactttctcaaatttcatagctttctcaaagcaaagattccatttgctttgcaaaccatattgcattcttaggagatagtgttgtaatgaaccacatttaatagtcttattcagtggaaaacattttcaaaatcatcacctttttgagtatccaaaatgttctctagattcagagaaataaaagaaaaaacatgctataaatatcttcattaagcaaacactatgcagaataaatgtgctcttttcttacctcagtgtaattttcagtattaagaacagtgattatgtgggaaaattaaggttttagtttcaaagaaaatacattttcttaactcaaggatgagattgattttttcatatagtaagaatgtattagaaatagatattcatgctagtaaatattaatggctatgatcacagttaattgttgtatggtgttttatgttatgggactgaattatattttacttaattattcctcttgttaggcatttattttattttactttatttaattttatttttcaaataaggacatttaaaaaaatccaatagtttttggtaacaggtggttttttggttacacagttaagttctttagtggtgatttctgagattttggtgcacctgtcacctgagcagtgtacactgtacccaatatgtaatcttttatttctcaccccccacccacccttccccctaagtcctcaaagtccgttatatcattcttatgcctttgcatcctcatagcttagctcccacttatgagtgagagcatacaatatttagttttccattcctgagttacttcacttagaataatggcctccaactccatccaagttggtgtgaagtctattatttcattcagttttatggctgagtagtatgtcatggtatttatacaccacattttctttatccacttgttggttggtggacatttaggttggttccatatttttgcaattgcaaattgtgctgctataaacatgtgtatgcctgtgtttttttcatgtaatgacttattttcctctgggtagatattgagtactagaatttctggatcaaatggtagtttttagttctgtaatttttataactgcttatggagttgcctttagcacaagtttacggttcaagtatgcaaattgcttttaaaaaaactaatggtgcttacaaaattttcatttgacatttttttggctagttcttcttgtctcttctcttcattccaaatttctacttcttctgtttccagatctcttggctaaaagacagtgcattttccttcagcaaatatactgtaatctaaaacatagaagttaaaaaaaaaagattagaagaaaggcagagcatatgtgattcctttagtttcccgcttggacgtgtatgtactcccaaaattcatatgttgaaatcctcactcctaaagtgatggtgttaggagaggggcctttgggagatgatgaggtcatgcatgggattggtgcccttttaaaagaggcctgagagaaacacctcaatgcttcctccatgtgaggttaaaatgagaagaaggctgtctataaggaagtaggccctcaccagacaagaaatctgctggcatcttgatcttggactttccagcctccagaactgtgaacaacaaatctctgttgtttataagccacatagtctatggtcacgaggcctgcttgtggtttcaatcgctcccaaattactgctattgagcttaccagaatctatttcacattttgttttcctttaaaataacagtaataaatctctccttgtaattattgcaatcccatcttttttgtctatatgtgacatagacctgcaaatctgcattatggtgggaagatccattggaaagtcacaggaagcatttctggctagattttggttctcagggtttgtttgaaagctgctggctgcctgagagagaagaaggggaaaggagggtcgtgaaggtcatggcatgaagaaagcagcagtagcagtaatgaagaaaggacagggggcacttctcctaggacccccggtattttaggggtaagtggtgaaatcctacccacaagcagaaaattttcagagagcagctctgcagagggtgtaatcacatgtctgaaaaaagaggccaacctgcccttgtccacttctggctatgagttgataaaatggattgccaatactttgaatgataactgggattctgcagaatctatagcttgtcatatctgcagattaaatacatgcatttttttctgttgagtaaacctcagtctgtatcaatatcttgagcatgcgtttaattgaggaacattagtcttcccatggtagtatgttttgtcctaattgagatgagatatactcaaactgtgaccatgtgttagaagtgatccatcgtgttatacatatatcaaacaaaatcccaatgactgaggtaccattagcataaaataagcagcccatctgtaggtattttggaatgcatacttttcactcatttgcttattcatttattcatttaattatttttttcagattctagtcatgtgtcattttttttttctgttgagaactttgccaggttaaaaaaaaaaaagaagaagtggcccttgaagtaggttcagtctaatggctttgagacacttattgacccttagagtcaatcattaaaaagtattgtagccagaatatatttgtgagcatgtgaagtactagtgcagaaggaatttcagtgtctctcttacagcaaatagtgtgctgtgctcctctagcaccaaaaacttccacaagggagggtatgttagcttggatatctgaccttccaaacctcaagttgaaatctgatccccaggtttggaggtggggcctaatggggggtgttgggatcataggggcaaatccctcatgaatgccttggtaatgagttgagctcttgttctgttagttcccatgagggatgattgttaaacagagcttggcacctccctccacacccatctttctattctcttactatgtgatctctgcccacactgacttccctttgccttctgctataagcggaagcagcctgaggccaccactggaagcagatgccagcacccatgcttcttgtacagcctgcagagtcatgagctacataaacctcctttccttataaattgcccaaccccacgtatacctttatagcaatgcaaaacagagggtataccatgagtgttgtcaggtctcagtgactcatgtgatctagtcaattttggatttccagagagaacttttattttaaaaaaagaaaagtaccattgaaaatagatggtaatgctatatattactgtaatgtaaaactaagcaagtatttttacaattgcaaagtgtccttaaattcaataaatttacaattaatgtagtgagtgtgtttattgaggcaaacactcataatgctattttcaaaataacatgaaaggagagtcacaactgattcagcaaaatatgccagttaccaaaggacttgtttcccattctaaataggttcattagaaagtcctgaattttaatgggttttggtatttgatagcctttgaccaaatagaacccccttgtacagtgtatagtgacatttctttcatacagagagattttttaaaataataagaaaatggctctgtgacttaaagtaaatattagagcaactcacttttcattcttgtctgatcattgatagtattagcaagccatccctcctgctccatgtgatacatccaacaacacagggaagtgttctgcaacagccactcagtccacacaattttaattcaacattgagtgtcatagaccttgttgctctcaattaatgtctctccttttaattttgctttcatgattggtctgaaactcagtactacttaattaccatgatctttggtttcccttcaagatttcaattttagatttccctgtgaatttgcctcctttggccacctcaggctaagttcatttccatctgaacttctctacctcagaaagaacctctctttactaccttctcatatttctcattctgtcggcagattctgggcaaaattattccttttacagcataatttcacatagctagtgtgtggaacattacctgtttcatttgccttaggaattttaggtttttctaactatggaaataaaaaaatgagttaattaagtgatatttaaaatacaattattttaaaaaaggagaaaacattaggacttgtaactttaggacagaagcttgatgaacatggaagaccaccatgatttttcaggatacaatggccctgaagtatatgtctcttgaagttcttagataactccaatgtaaaccaacatactgtgtctgattatttcccaggtacattagggctctgagtaaattaccttccacacaagaagtaaaattattgcaaaactgtgacctctggttgctcatgctgggctatttcttgttgctatcaaggaagttacatcaaatatatgtcaaagttactggattgagaggaattggtatgaaatacgatctgaagaccatgagggatttatcaatgtcttcacattacctcaatcttttgtgagctcttgcaggtcaagagatggaggcaggggaaattatagctgcatggtcacaggtatcattactcctccttcctctgcacacaatgggtctccttggcaacacattttctctcttgcctttgaaaactgttataaagtagaaacaatttgggttgttttagcaatgaagctgactgaaaccaaggccaggaaataattgtttttctccccagtagaaaaagagctcttccatgaatataagttagtcatgagttaggcattttactcatacttgatgcatcctgtgttttcacaggacatttatgctggcatcccataaactgggtttgaatatactttggaaacccaagtgacagttgccaggaaacccaagtgactgctgccaggaaaagaacaattcaagattcattataagaaccaattctaggggagagaaaaatcaaaaattgggcatggtccattttctgccttgtttcctgttaaatggaagggaccacagtcttgttaattaccgatcagaaaatggtacagagcagagatgcaattatttaacacaaatttactgagactatgtaaatattaaacttgaaattactgataaaaaatgtagtgtgtcaactaaagattttttttgcaatcttgaaagtaaaaagaggcaatgtatttaaatagatgaggaccatgcacctcattccttccagctctgagtacaaatgaggtaacattagtatctccctggcctctggatccacctagtaatatcgtatctttcacataatttaaaataacataaaattaccgctgagagtctctggggatgtcacatatgagagcatgaaagtgttgtaatccatgttctgctttaaccctttggagatgcccatttctctccacaacccatgagggcatcccacaactattaatactctatctggcagttcttgccctgagaatgctgatgtctataacaaggattttatttcttgatgctccaaatagccctgtatatattgaggtcctccatgcactgaaagatgagaaggcccccacatctcacagaatccctatgtgtacagttccttcagattctgcctataggcttgcttgcatagactcaggcataaatccataaggcttggcaagactggtaaaattttaagcatgacatcatgcttcaacttcctaatctcttccctccagtcacttatatgcaacagctcatccttcatttccagttctagccctttgactccattagaaattcttttattcttaaaataaacccttaggaaaatttgaataatgcaaaccagcagttccaaaggtgtagtccatgtacctctgttgcggggtggagggggtccctgaaacccttttaggtggtccatgaagccaaaaataattttatagacagaagacctttcatttacagtgttcctagattgccagaaatctaggaatgtattatcaacatgaagtgagcactcttgaggtctccacccatattaatccctctgaaaactgaaaaacagcaggatttgccggagctaaaagagctccatgactccataagaagtccggtgctgaagcttaagagactttggtttcatgcagggcagggtgactaccctgtattgcagggcagaaaaaaatcctctgtgataagagatagagccggtactctgtgagacatctgcctgtgctgcccatgaagtgagacctcatggtccctgccaagtgggtcctcactacactgcccagcccttttagccagagctggctggcccaaactgaaccagctagaaattgtcctttagtaacttggaaggaggacaaagaggatctagcaagtgtgcacacatgactacattgactatatttgtcatgtataacagcagtaaagaatgttggtttttagaaagagagagaagcctgagacaggcacagagtaaagcagagacaagtgaccatgcagccccagaaagtgagcagcaagagagtacctgggcaccttcagtgtggggtactctccaggtgcttgtttcaggctgtcatgaagacagtttcattcccagttctttcattccataaagcttccctttctacaaaaataaatttcctgttttaatttaaaccaacttgagtaagttatgttccttaaaaagcaaacaattcctgatgaagttagaaattgatcagaaagggctgctaccagcccacatgacaccactgagtttttaaaaagcatttttttgttcctcaaataaaatatatttcaagtcactatatcatttatataacaattgtataaagtatacattataacatacataatttacataactgttctataaattatatataataattaactatgtaataataataaatagtcatgtatctgcattagtagaaagcacctgtgtgtaacaggtcattttttttcttccagtttttcttcaaattcatgagatgtggttgatatggaggtagaggataaatttatatcttgccctgttggtgacatacctgtacttgtagtttgctgaaagtaatagctctgattactcttctctttttttctggtattccatcaaaattttcaatattccatttaatgatacagaatagtgttattatagtttctctactaacagctccggttttctttaatcctgacatctgtgatgaaataatacagcgtgaagcaggtcactgcgcactgaataccaacttctctgagtctagtgagacagaagacccacaaacacaagttacatgaagcgagtttatcacttgcagataggcagcaacggacaaaagaagccttggattcatttcaaagaggttcctcaaagttcaagaaagctgcctggggcagatggaatatcaactctgcatgcctctcttgaacagcagctgagggcctggaaagcagtcaccctaggtttcacatcctggggccacttggttcaatgcactaagacgttaaagcatagtaaggcagggcggtgaggaccctctgcttctggggctggggacctgcaacagagtctgggctgttctagccagttctccacttgtcttggctattacattccaagcacattctacaattattcttgagaacgacacatgagaacctagggggtgggacggtggaggacagaacgtgagtccatccaaggccaccaagggaactgtcctgcatatagcagttagtacgttatcttaaactgtgtaacatttcaatacaatatgcatctagaagttttttaaatctgaatgaagttatattttaaacaatgaatcctggaagcaaataatgttgcactttagatgccaaatcattacagagtaattcttaatatgaatacatagaacactttaataataataataaattttattgcatactggcttatgtcataaaattacttatatatttaattttaaaattcagcaatgtgattatagtacaattaaataaaggagtatatgagctacaatatgaaatatcaaacatagccactgtgctaaaaataataggggcttaaaatttttttagaatatggtggttaatgataagtacattaatttgaaatacgatctccttgtttagaagattattttagatgttgttaaatcaacaatgtcttgattattaaacagatatagatgtgtatatatatcatgttagaacaatgcactgtatttccatctgcctaaaacttggtataacacactgacttcattagaaagaagcactttattggcatgataatttttgaattaaaaacataataaaattttttatataaaacctgaaaatattatcaatgtgtactttgtaaattgcaattcccaacataattctttgacttcatacttaaatgggtgatttaaaaaccaaggaaataaacaggccaaaaagtatcagaaatgttagtaattcacaaataccatgaaaaaatattgagtgtataatagagttctgggaacaactttacattctctattcaaggaagaactctccaaggtggtgatgatgtttaagctgagctaatgcagaagtccttaggtgagaattactcggaatgtttcagaaacagaaataaggtcaatgaagcaggaacatagtgaaagaatgggagaaggaagaaacagagaagaggacaaggtgatgtccttggccagggagggccttaaatgccaaagtggggagactggattctgtttcagggtttatgggacataactagagaattataagcagcaatgtccaggcctgatacatattttgaaaagacactttggctgctctggtggtggatagatggggatggaagaacagtggaagctaaggagatcagtcatcactatagaaattcagatgagcaatgatggcgtcttggattaaggtagtaatatggagaaatatcaaagaaaggggagttgggaattatttgaaggtagagtgaaaagacttgtgtatatagtgatttggaaagagggaaaaaagtgattactaggtttgaggcatggacaactgggcagttcatgttcttattgactgagactgggaaactgagaaggagttgcttaggaatatagagaatcaggaattctgtttggggcacttcatgtttgaagtatctgggaaacaaatatgtatagatatattaagtaggcagttgaatacatacatatgaaatccagggctaatgctagacacagataaattttgaagtcattggcatacaagagatatggcctgcatgagagtgttcagatgtgcaaggaaggcgcagggacattgaactgagatgtgttaaattagagggtaaagagaggatgataaatcagtaaggaacaggcagcttggtggctcaaccgggaaggtggagccagggaagatatgagaaaagaaaatctcttaagtagtagtttgtgatcaactttactgaatgccgatgagtgaataagtacaatgcgagttgggatgggacccttggatttggcaacatgatggtttctcagtttccttgatagaagcagtatcagtggagtggtaaggacagaaatccagctccggtgctctgtagctagttcaggattctatgctatggccccattcatgcatcaggttgctgtgaaagtaattgcaagttttgccattaaaaataattaaaagtaatggtaaaaactgcaatgacttttgcaccaggtaatgttctggttgggagagaatagcattatgatgactggaaagagactgtctggagaaatcaattctcccaggatgctgcaaaaggtttttttctgcatcccagctaggaaaagtgatgatgtaattactccataatgaatttcataacacagaggctcattggttgagcccacgtcatgatgttttttggttggcacaatccaaaactttatttctggaccctaagatttgaattttgttcaactttcacatgccatgaaatattaccattattttgaaaatgttttcagctatttaaatatgcaaaaatcactcttagcacatgggccatacaaaacagggggcaggctagggttttggcttatgggtcagaatatacatcaagacattaaaactgggattaggtttaggaatatgaaggagaacaaaagataaggttttttccctttcacttttaaattaagacatattaggcaatagaaactttacaggtctgaccaagttgtctattagcacaggcttagggctttctgggacaagaatagacattggattaaagcatttcccagatgaaactaattacaaatctcctggtattgttcttttaaaattatatcaaatctaaaacctcatgcccatgtttcctcatgtccatcattacctactatctcttggcattctttagctgtatttctctacttcttctgcaatttgggggccaagagcattcaaattatattacttagtttcctttgtacagttttcttctacaaataaaagaccccagtggaagatcaaaggtaggaagagagaagggtttatctcttttgttctgtctctgctctggaaatgtttctggaagaggttatatctcttcagaaaatccgtgttggccatggggacctcttctccatggttctggtaccaagttatgtagtccctctttcatacttctgtgctcagaaaacatccaatcctctcttttgtttccacagccctaagagtcataaaccatttcctacattactaatatttaggtcatctctccattacctttttgctctctcagctttttcaactcctgtgaaggaaagttcctatatcacattccctctatttgaaatattaaaaggttttctgttattattatttttttactggaccctaactaatccacctcataaacagagccttcttcagcactccaggcataagaacaaaggagagccacagactgctaagtcactcctcagagttgctattaaagacatgggttgaggacagccactcactgggcagaatggaaagaacacagttcattgccaaggaaatgagtcagcagaacgatttttataaaattctgatataagtcactgaccaggtggtgttgctgtacaaatccatggatttgtccaaggtctttaagttttggacagctatctttcccagacaactgtaaaaagttgccatctacgtccagaccactattgcctatggcaaggatgctttcctcccggccctataagaagggagagtgaccggggagagtattatcccctggactgcagacctacaggcagtctaaccgacaaaggatggggcatgcttctctgtgggatgatgacagctgggaaacccacacctattcttaccttcttgctagacgtgggcttgtgagtttccactttttccttcaaagaaagcctattcctcaatctgttccatttgctgttcggtaatcaatcatgaaccttgatatacgacaagtaaggacccagataaagcccaacttgcatcgctggcatgtttgaagtcataagtaattacagtatgaaattaataacaataaggtattacagttgacccttgaacaacacaggtttgaactgcatgggtccacttataagcacatttttctcaaccaaataaaataaaaaaaatacagtattcataggatgtgaatcccttgcataaggcggccttgactttttgtatatagctggtttctgcagggcttgagtgtgcatggatttgagtatgtacaagggtcctggaactaatgccccatgtatatggaggggcaattgcactttaaacctatagaactggcaaaacattagaaagcttgataatcctaagtgctggtgggatatgggaatgtagcaattattgtgccctgatagcgggggtagtgtggatgtagttagtcaaattaagcacacataaacattatagcctacctctttctgagcatttctcgctgagaaatcttcatgcaggcccttcatgaaggacacatgttaagtatacttattgcagtgccatttgggaaggcagggaatagaagaacctggattgtccagcagaggaaagtagataggtgaaaagcggtggaagcacactatggattattatgcagcaattaaatgaaacagattaggtgtacacagagcaatatggaaggatcttaaaaaattgagctcagtgcaaaatgtgacttatataacatgacattatttaaattaaaatatgtatgcacacaatataatataaattttatataatatctaatgtaatatgcaaagaaaaatgtactaaataaacacatttgagtggatgtcaaagtggataacgtaggtatttagacaaaaaagtaaaagagaatatataaaggagcaaaacagagagatcttacatggccataaatgatgtcgtaccttgaacctcaaacatgattaactcaatccctggcaattatgtaaacacacagctacaaatgcaaacatattacatgctaattaatttaacagtctagatgaaaaacatacattttcagaaacaaactttaagacggagaataaatataaaattgaaatggccaataaaccttaagtaaattaatatattcacccaacactatctcctccctaaattctaggttaagacaattttagatacattttaccagcttctaagaaataatttctctctactacaagcatttgcagaaaaaaaatacaggaagcaaaatttcccagttaatttcatgaatttcatgaggcttatataacctcaattcctaaagtagacaaaagtagtaattgaaaataaagaaaatactggattttaaaatcattttgttattaatttctaatttttctacattatggtttgtaccagttcatcatagtgtataagatattgaattggggaattactgaagttttctctatggcctcatgcctcatgcactttctaaaatagttcacgtgtgtttgaaaacaataaacattttccgttaagtgcatacgtcaaacaaagcctagcaataacaaatagttcaagcttattgatttgatctctgctaatttttttgtttgcatcatcttcagctttggaatggaatagactaaaatcttcaagtataattattgttttatttatttttctgcagttcagcagttgttgatttatatatatttagaagtacatcattaggtacacatatgtgtatgaccattatatcttttttctctgatgttttttacgggagtgtaaaactctttgtactaagataacataactgctactagaaaatcctagatatttcacaaatcatcaatgatttagtaaaatataaaatactttctatctcacacaaagagtgattaactccagacaggtaggtgtgttcctcaaggccattcagagaccaggactgacagtcaatgctacctccaatacatagctcccaaatttgccttgagcatcaatattggccaacatacgtgggacatgaacatcacacatgacttttaaggtccaggcctgaaagtggcatacttctgcccattttttcttggctgaaatataactacagggcaacacctaacctcaaagaaagctggagaggtagtcttgctgtgtgtatgcttcagatttaaattaaaatctgactggtttaaaaattataggttgatttgatttctttaaatacttcaaaaatattacttcattgctttcttgccactaaagttactgttaagaattttcatatggatctggttctgtcttctttgtagaaaacttttagaactttctaatgtccttgtatttcattataagttctacttttacctcatatgatctttttctaatacctctatttttcatatgttggtagttctgtttctatcatccatatctcttagctttttttaatgtattacttctcatttacctttcatgctacctttgggaagagttcttcaatataactaagtgcattaatttatttcttaactattttcatcctacaattattctaaactattgcagctgttttacttggcagaactaacattttcatttcctatttatgatttcttcctacttcacgctactaatattcatctttttgtttttgagaatatttatcaagcttgtctaaaattatttatttttgtaactgtgttttgtgatattcatcgttatttttgctttctttgttggaaggattgttctcctgagtctattcatattgccttgcaattctatatactcagaatgtcttcctgttctgacatgtaatgtgtattggggaaaagctaaaggcttggtagtacctgtcatctctgtaagtttaaggaaagggcaggagaggagaccagtgcacacagccccaggcactacagacccagtctatagaccattagacacagaaggattcacccttaaagtcatcttagacagaagcagattcagaaaaggtcatttccttggtttgatgtaaaacctgttgtttggaacagagaggaggcaaagaatgaatacctgagggaagctcatctttccataactgtttacatcagctccttgctccagcagtacttttgtgttacccttgagttattttcagtattcatttgtttttccaagaccaagcaacctaggcttgagggaattcttatggtgatgggaccagcaatgattggagggaagaataaaacttagtacctctcttccaaaatatttcctccaagatgagatgaggcacgcttagccaggtgctaatgccacttgtaccagggtccgtctccacactttcccagatactttcagtcagtctggggctctcaggtgtgcattggtttttcaaatccttgattcctcctatcttctgtaatttatgcagggctgagtcaaaggagggagaaagaataattctaaatcagattatttgtttttaattgtgattatgttactttcgggtgaatagaaatgtcaaattttactgtaatcaaatattttgttcatttaactttattccatgtggtttccccttcaattcaactcatttgggagatataacaaaggcacattagaaaccttttcagacactggttttctagtttgtgactaggaggcacatagcagtatgtgtgtgtacgtgtgtgtgtcttctgttaaagtgtcaagagtaaagaatttaagcaacaagccatgtgagaagtcaagcagaagtgtttggcattgtttttctagaagacatacctattttactccatttatccatttattttctggatagtagaaggctactgaagttttgtgagtaaagaataaacatgagaatagtagtgttttcatcagattgcactgtgcagcataaactggaagaaaagatggtagagaagaggaaggccatataagaagctatgctgatacttcaaatatgaggtaatggtttagatatgggttgtattcccctctttgtgttgctataaaggaatatctgaggctgggtaatttataaagaaaaaacatttatttggctcatggttctgctctgcaagaagcatggtgccagcatcttcttttggtgagggcttcaaggggctttcaatcacggcagaagggaaaggggaagaggtatcatatagtaggagagaagaaaaagagagagagtggaggagaggccaagttccttttaacaatcagatctcaagagaactaatatagtgagaagtcacttattaccaggaagatggcaccaagccattcatgaaggatccactcccatgttctaaatatctcctaccaggccatgactccaacattgggactcaaatttcaacatgagattaggaaggttcaaacatccaaactaaatcatgggtcactctaacacagtaaaaaagaaagaacagaatgaaatttgagcacattgaagttagaataacatgatttaatgattatatatgaagagaaattaagaggcaataatcattttactaaaataatatagaagggacagaaaagagtttttgataaggaataatgaccatagtatagaaatagaagaatgggtttaaagctgtgttttaggaattattatcggtccttagatgtatttcaggccttatgaaagtcactgcacttaatttaaaaagaaattattataaatgttgatataaaataataccctcatttaaatgcataatatataaattttatctcattgacagcaacgaatggctttaaacctgtgtctccacactaacccatttttaatgtgtgaagactaagaataaagctgcatgttttctctatatctaccaatctagaattcttataaaatattaatcagagactgttgctcctcaatgttattttgtgaatttaggcctgctaacatggacacactatatatctgcattccatgctatgatttgaatatttgccttccaaaattcaggtgttgccaatgtaatggccctaagagaaggggcctttaagaggtaactacatcatgaagtctcctatcctaatgaatagattggatgcccttataaaaaggcttgatggagaaattttagagggagttgttcccttcttgcccttcttccttccaccatttgaggacaaagtattcttcctctccagaggatgcagcaataagaggctattttggaagctgaaagcagccttcatcataccaccaacctgctaacattgtgttcttggattttccagcatccagaactgtgagaaataaatgtctgctctttataaattacccagtctcaggggttctgttatagcagccacatggactaaaacaatctacatgcaaaacgagttacagaaatctagctgagctatcatccacaactgtatgtatgtatgtaacaaacagtctagttatcacatttaaagactttataataagtacatgctattttgttaattttaatctgattaaatattgggtttctctttaagacttgggctacacaatggaatctagatatagaaagatttgaaagctactggtttagaacacactgtgtttgaaagtttggagaaacatagatgaaaataacagaacattgggaatgcaggattaaaaattctgttgatgattttaaggctggtgattgatttgaaactaacccaggtaattaaaactatgagaaggaatgagtgtattagatgcatccaaggtatgaagggtgagaaagagaagaatctagggctaaaatagaagggaaatcagaggcttaatcagggtttaaggaccttagattattggtcttactctgagaaaccagctaaaaaaatgtcgatctccactgaagtaatctcttagctttatgtcggttgactctaagacaaatgtctggacaataaaaactaaactccagagagtttaagaagttgttaaagaggactttaaaatgtctggtgaaaggaaaagcctgcctaaaagaaagtaaatggctaaattgattctgtgataaagtgatagtccaagagaaagtgtagctaatatatctttttttttttttgagatggagtctcgctctgtcgcccaggctggagtgcagtggcaagatctcggctcactgcagcctctgcatcctgggttcaggcgattctcctgcctcagccttctgagtagctgggactacaggcgcccgccaccgtgcccggctaatttttgtatttttagtggagacagggtttcaccattttggccaggatggtcttgatctcctgacctcgtgatccacctgccttggtctcccaaagtgctgggattacaggagtgagccactgcgcctggccacaacatcttttatttatttatttatttatttatttatttatttatttatttattatactttaagttttagggtacatgcgcacgacgtgcaggttagttacatatgtatacatgtgccatgttggtgggctgcactcattaactcgtcatttaacattagatatatctcctaatgctatccctccccccaccccacaacagtccccggtgtgtgatgttccccttcctgtgtccacgtgttctcattgttcaattcccacctatgagtgagaacatgcagtgtttggttttttgtccttgcgatagtttgctgagaatgatgttcacaacatcttttctaattgacgagaataacagggaaggaaagggagagaggagagcaaaggaagagtgtaagggaaatggagaggaataaggagagaaagacttcatttaatatctgaggttaaaataaatcctcatcatgtatttcaagtatgttcagtgtcaaatctggagatagatggaaaaagaataataaaatggcattctactatgtaacaagttaaaaacaataaaattgagagatggaaaaccagcatataagactggataaaaccaaagagagaataaatgcaaaagaagtcaaaggataattgagcacataagaaatgtataagaactggagttccatcaaatttctctggagaatgaggaaatgcaaaactaaactaggagagaaaaagagtggtt

SEQ ID NO: 492 - DNA, 20001 bp, Homo sapiens
tcttgcaatcttctctacctcttgtaccaaatagaacaaatctgtttattctagctcttaaatagcttcaaatccattgcttcatcttcatccgtagggctcctaaccaagttggggccaccatcatgttttgcagaaattcgtatcacagcctcctaatcaatccctccggctcccatcttcctccccttcaatatattcaaaagccaagaatcttttctaaaattataaatctaactacaatattcccttatataaaaataaatagataaatgcacagccacatgcatgcataaaactcgtcaatgcacgcccatcactcctgggtgggattctagccgaattccacaggttttccgaggccttccataacccagccttgccaccctcatccctcccgcccatcctctccctcccccagggaacctgctctaccctccaacactgtgaacattctccagttcttcaaacctcatattccctccttcctcccagcttccccatatgtgttccttctgccggaaacacccttcccatccccagttaccccctgggataactgatgtgtgaggtcatcttccaagtcttggttacgttttcctcctttgtgcccctgcagttctctatatgtcctttatcctagcactcaccacgtgccataccatacctctgttttcttgttggaatcctgcagcaattaggcaggggtcggggcttgtagtcggttgcatcccctgtgcttaacacggtagctggcatacagcctacaccaacaattatttggttttgttcttttgtgtttttgagtcagggtctctctctgttgcccaggtttgagggcagtggtgcaatcatggctcactgcagcttcaatctcttgggctcaagagatcctctcacctcagcctctcaagtagctgggaccacagccgaacacaagcaagcctgactaatttttaaattttatgtagcgatgggtctacctatgttgcccaggctgatttcaaactcctgggctctaacagtcctcctgccttggcctcccaaaatgctgggattacaggcgtgagccaccatgcgtggccaacaagtacttgttgaataaaatgagagaatacatgaatccattattggctggtggctataaaataacaaaatattcatgaaattatgtctttcatcatatttggaaacttctaatttatcagaaaaagatgctatttgacaggcacatggatttttaatgtgtttgtcactctcaagtctggagacactttccgcatgtttatttctccagtcaatagcaggaaggagaacatacatttttcactcaaagaatttttttgttgtttgttttttgtatttttttgagacacagtcttgctctgtcgcccaggttgaagtggagtggcgtgatctcagctcactgcaacctctgcctcccaggttcaagccattctcgtgcctcagactcctgagtagctggaattacaggcacgtgccaccacgcctgacaaatttttgtatttttaggagagacagggtttcaccatgttggccaggctggtctcgaactccctgacctcaggtgatccacctgccttggcctcctaaagtgctgggattacaggcatgagccaccacgcccggcccaaagaatttttttgttccattacaaagtgagctaacatggattttatttccttgcctgctataaagagagaactacattaagtcctctggaagacataaaacaacatgagaatttcaattttatttaaagtacatatattttcactaaatatacatgtaccctaatttcaagacctaaatataccataaaacaaataatcttttaataatagttaatgttattcataaggtttcatttcatactaacccaagtaaaacactgcctgcagaaaaaagtgacttagaaataattcaagttttcccattgacatacgtaaaaatacaggcccaaagcagctcggtaccatgcctactatgtgcactatgatggtggttatgaaatacaggtgtccataattcttgtgtaaaaacagactgcctggaataggaattggcaagttagggctggtttggtgagaaggtcctaggactggccttctgattcaaagtctcacctactcaccactgaagaatagtggcagttgaaggcaccgcagggtctatttatgccttttggtgatttcggggaggcaatttgagcacatagaaaagaatgccagtcaacttatgatcaagtttcaaagtttgtattataatcatatttctgatagcaaagatgaactggataggtacttaaaactgaaaaaaaaattgaggaaagtttttcctaaattgtaagaatatataaagttttggataggcagaaaaaaatggatgtgggtgctatttcaaacagagaagtatgccatcatcaaaggtgcagggaggttgggcacgatgactcatgcttgtaaacccaatactttggaaggccaaggtaggaggatcacttgagcctcggagtttgagaccaccctgagcaacatcgcaaggcccttgtctctacaaaaaatttaaaaattagctgggtgtggtggtcctcctagctactcaggaggctgaggtgggaggattgcttgagcccgagtttaagaccactctgggcaacatagcaagaccccacctttacaaaaaaaaaattttttttttaagtgcagggaaaggaataagctggtcccagcaggagaaggagctcatctgtcactgtcaccagtagatagggatctgtttttcaagtagaggtggaaaatgggctcattaatttctttacaaatggatttgctgctcctcaaagacattactgaacacaagagttaaatacatcaagacacttttttttttctgtaatctagggagaaggtgccacaatcaaatgtgagggttgctcactgtctcaaatgataaagtgcagtgcacacagcacacaagcgaacccccccagcccagagccatcagggatttccctgcgccaaagcagcagagacttgtcaaaggttagagcagctgcgtcctcctcagagtaactttgtgagccgcgagttcaaccccagaggctcagacctcatcttcaacccctagtgagggacgtcggtccacagcttgtattagggccccaagccgccttctgtgagcgatttcacatcaggtataaactgggcacttctgggaaatttcagtccgtctgaacgttagtgacccaggaagtgcgagtgtgtggattagggggtttcccacacagagaagcaactgaatcgcgatgtgtgtgtctgcgctggggaaggagactcattatctggagctcggcacatgcaaattcagcacaagctacagatgcctgcacagcgctaccggcagagttcccacggaaaatcacttccctgtccgcctctcccacgacgcgttaacattccaagcccatcaacctcgcctctattatacatgttgactgaaggaggagtggtttcgctctatgttcatatttcctttctgtgaaggcatgagagcatcagcaatccatgagagcagacgttgtgtctgttactctatctggaactgcaaattacttacaaatattcctgttgcccccaattactgtcccgcctgaggttctgcagcaatgcagggctgaatgagcatcatgctgctttcatttcgagttaacatataggaaattcgtaagtgattaggaaaactttccggttttgattgactctctgctactccagacatgcaactgttacttcagcacttacgtatgtgagggctttttaagagttgggagaaaaaagccataaacaccacagttcagtttttattaaacctgttgcttcacagcacataactccctgaccatagcaaacgattctttctcagttaaaggccatgactgctactaagcaagttttgttcacttttatgtgcacagggcataacaaagggcacagactaaactaataccttatcaatgcaacccaccaagtaaactgaactgggtgaatgaaagaatgaatggaagagacaagacgcagagggaggaagagtgtgtgagcctcagcagcaccagtgctttgagccaagaggagagtgcgatttgttgtggttgttgttgttttgttttgttttgagacggagtctggctctgtcacccaggctggagcatagtggcacgatcttggctcactgcaacctccacctcctgggttcaagtgattctcctgcctcagcttctcaagtagctggactacaggcccgtgccaccatgcccagctaattttttgtatttttagtagagacggggtttcaccgtgtcagtcaggatggtctcaatctcctcaccttgtgatccacccgcctcggcctcccaaagtgctgggattacaggcgtgagccaccacgccaggcagggagagagatttttattctgtgaaatgaagctggtgagaaaatgagggcatgggctaggggagtcaagtccaggctgtggcactgctgtctgcgtgacagccaataagttggaaggcaaggtactggggcacagaaggcaactttatttggaagagccagcaaaccaagaagtcgacagattagtgtcctaaagaaccatctggagggaatgcaaattttcaggctccttttatgttagggcaagggagaagagggagggagttgaggtcaagaggtgaccgatgaccacagacatctggacactagcaagggtccaaggcggttgtgaagcctctttgtccctggtcaggccacagtgcacctgtaaacccttaacataacattgctacttgtgtggccctccttatctctgcgtgggttagttaggggaagggactgctatcatccttgccttaaagttaaactgtacactcagtttctcccatagtgagcttggcctatgtgcagggatcagcaaaagcagttaacctaaatggtatcactgtggggcggggcggggcagggcgggtgaggagcaaaatggagttggtcatgcccagcctctttttcactgttatcctaggaagcggtgagtttgaccctgtacatctttatcttagtcctcataaagagcagggacaggccaggtgtggtggctcaggcctgtaatcccagcactttgggaggctgaggcaggtggatcatgaggtcaggagttcaagaccagcttggccaagatggtgaagccccgtctctactaaaaatacagaaaaaaaaaaaattagccaggcgtggtggtggatgcctgtaatcccagctactcaggaggctgaggcagagaattgcttgcacccgggaggcaggggtttgcaatgagctgagatcgtgccactgcaccccagcctcggcaacagagcgagactccgactcaaaaaaaaaaaaaaggagcagggacgacctggttcctccttcactaacggcaaacagaatgcttcacagcacatactcagaaagaatatttgaatcaatgaacagcaagagtcacttgcgaacagtcatttgtgaacagcaccctgagccttcatcacaccccacaccctgtctagtctccagtgttggacgcaccgaatgggtgaaaataacaagcattcgacgccagggctcctccggactagcgaatgattcctcaaatgacctaaactagccatttagaaaatgctgacgtgcagcgtgttctcaaagggcacttacaaaactaaatgttcttaggacgcactttaatactatttaactattgaaatgcatgtttgaagattgggatgggttgggggaaaacagtaacaaaacaataaaacatttattgcccatctactttgtgccaaaagtcccggcgtgaggggctctaccttggtgccctttggctcactccacaagggactgtccggggaggaggcccgaggggacaggctttgaggccagagccagggctttgagtttcagtgtcaacactgacctctggtgtgaccttcaaaaaagtcttatcctctctgtgcctcgatttcctgatctgggaaatggggatattgaggagggttgctggatggatgaagttagtaattgtagaatgcttagtatgtaatgagcattcaataagaacacttctcttagggccaggcacagtggctcacgcctgtattcccaaagtatgctcactttggaaagcataggtgggaggatcacttcagggcaggagtttgagaccagcctcgggaagagagcgagacctctgtctctacaaaaaaactttaaaaaattagctgggcatggtggtgcatgcctgtagtcccagctactctttgggaggctgaggtgagaggattgcttgaggcctggagtttgaggctgcagtgagccgtgatcgcaccactgcactccagcctgctccacagagtgagaccccgtctctcttttttttaaaaaaaaaaagaaagaaaggaaagaaatacaaaaaattagcccggcgtggtagtggtggtgggtgcctgtaattccagctacttgggaggctgaggcaggagaattgcttgaacccaggaggtggaggttgcagtgagccaagatcccaccattgcacttcagcctgggcgacacagcgagactctgtctcaaaaaacaaaacaaaacaaaaaaacaaaaaaacaaaaaacaaacaaaaaacagcgagagagagaacagctctcaatgagattgttagtattgattcctcacaaaactcctgtgaggtgtcagtcatattcttttcagctgcggaaactaagttaagtagaaggtaagcagttggttcaacatcctccagctaagaaatcactgtgggccgggtgcagtggctcacgcctggaatcccagcactttgggtggccaaggcgggtggatcatgaggtccagatgatcgagaccatcctgatcaacatggtgaaaccccgtctctactaaaaaaaaaaaaaaaaaaaaaaaaaaattagccgggcgtggtggtgcatgtctgtagtcccagctactcaggaggctgaggcaggagaattgcttgaacccgggaggtggaggtcacactgagccgagatcgcgccactgcactccagcctgaagacagagcgagactctgtctcaaaaaaaaaaaaaaaaaagactgcagagttcaacaattttgaacttaggtgtgtgctctgaagccggccgtccctgcctgcccctggtgcccaaaggcctgggagtttgaaagtgcaccctaagggtacatggttttaaaatgcaaaactctgaccaacagagagaatggactgaactttgatccattaaataaatcaaacccagagactgtgcagctacccagccataggtgtggtcacagtcactcagcggtgaaactggaaccccaccaggtgcagcagagggacttggcgtgggctcagccaccagagcccaaggatgaactgcagctaaagcttactgaacagagcctgtgcacagactcagcagagttcgctgatattttggtaaaaagcacagagcccgccctgcgttcagtgtgagcggtaacagctccaagcacatggtatgtatgacctgttttcaaggacctctgtgtatttttaaattttgtgaaattccccactagaagttaaaactcagcatttttaagaaattattattaaaaaccatttctatccaataagagcttttagttggagaagtttctgcatcttgatcattgtttatttaattagaacaatttgtttttaataaggcttatgaataacattttcttttgtgcagactaatttaaagtatctattttaaagtatacttaagcaatcaagaagacacaatggaaaaaagatagtctcttcagtaaatggtattggcaaaactggatatccacatgcaaaagaatgaaaatgcatccttatcttacaccatatacgaaatcaactcaaaatggattaaggacctaaatgtaagacctgaaatcatgaaactcctggaagaaaacatagctagaaagcttcttgagattgaacttggcaaggattttttggatatctcaccaaaagcacaggcaataaaagagaaaatatttaagtaagtagggctacatcaaactgaaaagcttctgcacagcaaagaaaataaccaacaaaatgaaaacccagcaaacagattgggaggaaatatttgcaaaccacatattggataaggggttaatatctggaaaatataaggaactcatacaattcagtagcaaaataccaaataacccaattaaaaatgggcaaagggccgggtgcggtgcctcacacctgtaatcccagcactatgggaggccaaggtggtgggggtggatcacatgaggtcaggagttcgagcccagcctggccaaaatggtgaaaccctgtgtctactaaaaatacaaaaattagccaggtgaggtggtgggtgcctgtaatctcagctactcaggaggctgaggtgggagaattgctggaacccgggaggtgggggttgcagtgagccgagatcgcaccactgcactccagcccctgccgacaacagcgagactccatctcaaaaaaaaaaaaaaaaggcaaagaacctaaatagacatttctccaaagaagaaataaaaacagccaacgggtatatgataaaggtactcaacacctctaatcatgaaggaaatgcaaattacaaccacatgagcccttgttagaatggctatgataaaaaagaggagatcacaaatgtcggtgagggtgtgtagaaaggggaaccctggttcgctgctggtgagactgtagattggtgcggccattaaggaaaacagtatgtggccccgacccagcaatccctctttgcaaaatgacatcaccacctcatgaaaatatcggtacccctgtttatcacagcaggattcctaagagccaagatatgtaaacaacccgtggggccattgatggatgaatggacaaagaaactgtggtatgtgtacacattagaatatttttttcagctatacaaaaggagattctgtgatttataatataatttataattaacctgaggacattttgcaaaataagcaaaataaggggggtgggggtggtggcgggaattgaggagatggagattgaagtgtagaaagtgtccactatgtaggatgaataagcctggagatgtgaagaatgctaagactgcagtgaataatattgtcatgtgtatcagtcagtttttgcattgctctaaaggaacctggcactgggtgattgataaagaaaagaggtttaacaggtttatggttctgccggctgtacaggaagatggcagcttctgcttcttgggaggcctcaggaagcttccagtcatggtggaaggggaagggggagcaggcttctcacacggctggagcaggaggaatacagaaaggggggaagtgctacacacacttaaacagccagatgttgagagaactccctgtacagtacccgggggtggggtgtggggcggacggtactaaagcagtcacgagaactccacccccacggtccaatgacctaccgggccccacctccaacaatgaagtgttcaatttaatgtgaggtttggtggggacacacatccaaatcatcatgtatgctggaaatttagtaagagagtagaatttaggtactttcaccacacacaccaaaaagggtaactatgtgaaacggtgcacatgtcatttgcttgactgaagtaaacttctacgtgtttgtgtgtatatgtaaataaacatcacatataccttaaataggtataattttaaaaagtatactttctcttctttcaaaagaagagaaaaatactcatttcaaattaaaattttaagaacaccaatcacaaaacaagagcatcatttaaaaatgcgtttgtaatcctacttggcaggtgggctaacatttcgaacttgacaaagacgtggaactgtgcttccaaggctgacaggcaggaagagcccacacagcctccggggccagcccttgttcctctctccatattctccccttatgctgaaacttaggtagagctcatgaacattaaaacaaagcaaagtggccgggcatggtggctcatgcctgtaatcccagcactttgggaggctgaggcaggtggatcacgaggtcaggagatcaagaccatcctgtccaagatggtgaaaccctgtctctactaaaaaaaaaaaaatacaaaaaattagccgggcatggcggtgcgtgcctgtagtcccagctactagggaggagacaggagaattgcttgaacccgggaggcagaggctgcactgagccgagatcatgccactgcactccagcctgggtgacagagtgagactctgtctcaaaacaaagaaacaaacaaacaaaaaaatgaagcaaagtgatagtcattagacattttgagaattttattttatcccttgagataattggataatgcttggaatttaggaatctgagctcatatttatcttttttgtttgttttgagacagagtcttactctgtaacccaggctggagggtagaggcactatcttggctcactacaacctctgcctcccaggttcaagtgattctcctgcctcagcctcccaagtagttgggatttcaggcatgcgtcatcacgcccagctaatttttgtatttttggtagacacggggtttccccatgttggccaggctggtcttgaactcccgacctcaggtgatccgcccgccgtggcctcccaaagtgctgggattacaggcatgagccactgagccaggcctgagctcatatttaacatctcttctatagagacctgcactgttagctccctacaggatatacttggtgtgatgacattttcattcaaatgtgtcacacacgctctttctcttcaagtctggcatcactggaaaatgcagctcctacacacccacactttaacggcacagtgacaagtgcagtaattgcctaagtgttcacatgagcagagatttgcttggggaaaaaaaaatacttgccattctattcaagtggctcgttctgtttgcggtaaaggcagtaaactgctagcgaggaaattagattctgacaaacagctctccccccgccggtgcactaattgaaatggagcctaacgcctttcacgaagagctgtcagaacgtatagggaacgccagtcggccaaagagaaagagcagccgcgttgaccttcagaaagctactgacccaatgcagtagacttgagtcaaagtggggattgcggcgacaggggagcccatcaaccagaagaggacgggaggtggcgcgtggggggcgggagggttttccagtgggcctgatggacagcaaacctaagccttacatttacccctgtcactgaaaattgaatccatattagagcaaatttcacaaagacgattccattctggtttagactttgtttttcatggaaaaaattcacaggcctgggcgcagtggctcacgcctgtaatctcaacactttgtgaggccgaggcaggcgaatcacccaaggtcaggagttcaagacccacctggtcaacatagtgaaacccggtttctactaaaaatataaaaattagccaggcgtggtggcaggcatctgtaatcccagctactcggagactgaggcacgagaatcgcttgaaccccggaggcggaggtcgcagtgagctgagattgcaccactgcactccagcctgggtgacagagcaagactctgcctcaaaaaaaaaaaaaaaaaaaaaaaaaggccaggcacagtggctcacgcctgtaatcacagcactttgggaggccgaggcgggtggatcacctaaggtcaggagttcgagaccagcctggccaacatggtgaaaccctgtctctactaaaaatacaaaattagctgggtgtagtggtgcatgcctgtaatcccagctacttgggagtctgaggcaagagaatcacttgaacccaagaggtggaagttgcagtgagctgagatagcgccattgcactccagcatgggggacagagtgagatgccgtctcagaaagaaagaaaaagaaattcacaggaagagacagggaggcaggattatccagagctgtctatagcagagctgctgtgcacagagcctggtgctccagccctccgggctgggcggttgggaggagctcactgtaagcataccactctgaaatctctggtttagagcagcctagggcctttatgtcatccacgatgccataaaaaagttttctatgtatgccatgacatggaagaggtggggaaaacattggcatgaagtaacagcagaggactacatcagtgttaaggaaatctgaacacaatcctgtcagagttccagtgctgccgttctagaattttgttatcttataggtaatactttgaaaacaaataatccacatatctataaatccgtctggaagaggaacaaaaatgaatatacaaagatgtcattgttgtgaaaaaattaaaaaaatcttcaaagtagcaaaataaaataggtaaataagttatagtaaattcatgctatgaaatagtatacagctctttaaaatggaatttttctgaaaaggacacatactttaaagtgagaaaagcagggcacaaaatttgatacaagatacggattttgtaaaccgcactcagaaaataaaatcagatcattgcatgcaaaatagtgttcctgggtgatatgattataactattttttcaaaatagtttacttttttcaacttaaatataaaataaaacataaaaataaaaacgtgataatgtattcgatggcagttttaaaatgtaggattgcttgtatcccagaaatcttaagaaaatgtgtctaatcatttcatttctactttctatacctgtaacttacatggttgggaatacagtacggatgtccttttttaaaaaattaaaatatatacaacaccgtgaaggacttccttctagtgcagatgactgacaaaatgaagagaagatgcacctgttccagtggtgtctagtgatttgaacagaaagaaactgtgaagaaccaggaatgaaatcctgagatatgaaggggactgtctgaaatccatgtgcctttttgaggtagtttcgtatcatctcctggaagcagaaatgctacaaagcagtggaaggaagctggggttttccctgtcattggggagtttaactctggggagcttatttttccccaactttattaaggtatgatggataaatgaaaattgtatgtatttaaggtgtaccatgtgatgatttgatatgcatatacattgtgaaatgattacataatctgtctaattagcatatccatcccctcccataattaccttttttccgtggggaacacacttatgatttactctctcggtaaatgtcaagtatgcattattactaactataatcgttatgctgtacattagaacctgctcatcttatcctttaaccaacattgccccattaccacaacagattagagatttaaatctcttataatgcttatatttagacattttagaactctaaacttaaaaaaaaaacaattctgcttaataagagatttatccccagattatttgaagacaccaggaagagagaggtcagggaagggagtgtggcccagggtgaaggttcagcgaacacctgctagatgcatgcaggaatgaacatgccaacaagccttcccactgaatgcacccaagtagatgacatgagaatgcattctctgtctgcaacattcttggcttaacttgccactgactttagcaagcagccatgcattcctgtgatgcagctttaatggcctttcatttgctcacattggctgagccctgtgcagagtggatgccacctcccttcctgcagccctgccatcatgtccccaactgtcctcccccaaccctcctccactcctgtcacctcagttccaacaatatccttccttctctttttagcaggggatggtgagactaatttttccccaccccatctcgaaactaaggacttcagattgcatcttggtgttgcacttgaaacatcctaaagctaacctgtaagcttgtggcagctcctgggaggtggcatttcatagcttggtttatttgccaagttccctacactcttaggtatcaaagaatccagatgttcagtttctcctaatccctgttgataccctattttttttaaaataatagctagccctgattcctgtatgtctgaggattacagctattttttaaaatttaatttttaaagttctactagagatggggtctcactgcattgcccaggctgtcttgaactcccagccacaagtgatcgtttcaccttggcctcccaaagtgctgggattacaggcataagccaccatgcccagccccgattttgagttatcaattaataccagcattaaagtaggtgaagttctatgacagttcatttggcaactcaaagccctgctttccaagagcttattccagtgctttcattaaaagaggtaaactgaaacttttgagttcatgtcacccacattagcaatgtgtacgtgggtgcagccttcttcaatcgctatctttttagaatgagtcccttatttcctaggctaatgcttagtttctttgcaaaagtgcattcagactgaggtagcatccacttttaatgcttctgtgcattaaaagttgttgcgggaagtcagggaccccgaacggagggaccagctggagccacagcagagaaacataaattgtgaagatttcatggacgtttatcagttcccaaatactagttttataatttcttatgcctgcctttactttaatctcttaatcctgttatcttcataagctgaggatatacatcacctcaggaccactgtgataattgtgttaactgtataaattgattgtaaaacgtgtgtttgaacaatatgaaatcagtgcaccttgaaaaagaacagagtaacagcgatttttagggaacaagggaagataaccataaggtctgactgcctgtggggtcaggcaaaaaaagccctatttttcttcttgcagagagcctataaatggacgtgcaagtagggaagatatcgctaaattctttttctagcaaggaatattaatattagtaccctgggaaaggaatgcattcctggagggaggtctataaatggccgctctgggaatgtctgtcttatgcggttgagataaggactgagatgcgccctggtctcctgacgtaccctcaggcttactagggttgggaaaactacactctggtaaatttgtggtcagaccagttctctgctcttgaaccctgttttctgttgtttaagatgtttatcaagacatacaggcactgctgaacatggaccctcatcagtggttctgcttttgccctttgtcctgttccctcaggagcatgtgatctttgttagacccttattagtagttctgctttttgccctttgaagcatgtgatctttgtacctactccctgttttacgccccctccccttttgaaacccataataaaaacttgctggtctgagactcaggcgggcatcacggtcctaccgaaatgtgatgtcaccccggtggcccagctgtaacattcctctctttgtactgtctctatttctcagccagccgacacttacggaaaatagaaagaacctatgttgaaatattgggggtgggctcccccaataaaaagtggcccccagaggctaatacagcttctggaaaaacatttgctgtttctgggcactgggaaagtctacctcacttttcagcaggttgagtaggatggctccacacactctagaataaaaatgaacgtgataagcacaatcacttcaattgattcttcgcatcagacagacaaaaacaaaaacaaaaaaccccctaaattttagaggtagaattaagaaaaatagaaatttaaaagtttaaatacttactagacttttttctgtatatctcttcctttaagctgaaccataatttccaagggtaccaaataaagattgtgacaaatagtaagtggttttgaaatctagtgtgtgcgtgtctcatagaatccaggtgaaacccagggacatcagaactcgttcctcttgtaattgaaagtttgtaacctttaaccaacatttccccatttcccccaagggattaaagatatttaaatcttttataatatttatgtttaggcattttaaaaccttaaacttcttaaaaatgattctgctaaataagggaattatcccttagaaaaagaacaagaactggccaggcatggtggctcatgcctgtaatcccagcaattttggagggcgaagcaggtggatcacctgaggtcaggagttcaagaccagcctgaccaatatggagaaaccctgtctctactaaaaatacaaaattagccgggcgtggcagtacatgcctgtaatcccagctactcgggacgctgaggcaggagaatcgcttgaatcctggaggcagaggttgtggtgagccaaggtcatgccattgcactctagcctggtcaacaagagcaaaactccgtctcaaaaaaaaaaaataaataaataaaaccaagaactaacgaatagtgccagttttggtaggtagaagtttaagatggcctcaaagaacccatccctgtccttgggtacatggtgtaattcccccccgaaggtgaatgggacttgtgaatgtgatgggaattcccatggctaggttactaaccagctgacttttagttactcaaagtgagacttgatgtcctgagtgagcacctgaccaaatcacatgagcctttaaaaagggatcaggccgttcctgagatcaggaagcaggtgaagatgtagctacatgtgagagggctaaggagctaggacctgactcaagagaagctgtcaagaaagtggggacgggctgggcgcggtggctcacgcctgtaatcccagcactttgggaggctgaggcaggtggattatctgaggtcaggaggtcaataccagcctgagcaacatggtgaaacctcatctctactaaaaatacaaaaattagctgggtacggtggcgcgtgcctgtaatcccaggtacttgggaggctgaggcaggagaacggcttgaacctgggaggcagaggttgcagtgagccaagattgtgccattgcactccagcctgggcgacagagccagactccatgtcaaaaaaaaaaaaaaaaaaaaaaagtggggacagccagcaagaaacagggaacctctgtcctacagttagcaagtacagttagcaagaaaatgagaccagttctacaagtgcaagggactgaattctaccaagagcctcgtgagctccccagcctcagatgaaaccacagcctagctgacagcttgattccagcctgtgagaagctgagcagaaaacctggccatgccatgcccgggggttttgatctatgcaatgagaagtaataaatgggggtaattttaagccactaaatgtacggccatgtgctgtggagcaacagaacactgataccccaatgttcttccaaacactggaaaccggtggtgtgagcacattccggacttccaggttcagatggcggagggctacattctgccccttcttctcctgaaaatcaatcaaacaataactgtttaagtaaataaaacattattttaaaaaaggaaaatgaatctgaaacaggaaatgggggaaaaagttaaaaagcaattccattttcaatgcttttaagaggcgttgttaactgtaaaccacgctacagcagatgcaaggatcgggcagcagagcctggaggccatgggaacaggcccctttgtcacacatggaaggtaatgaagaatggggtgagtggcagggatgctgtctgaacggtgttcaagctgttagaatgcagattctcagctctatcctgagccgcctcgatgatgaaatagacaaagagaaagaagcaggaatgttctcgtaacccagaactagaggactaagggaatgacaaatctccagtccccttatctggccaatttcaaaataagagcaatgatatttcccaggctggaaacagaaggtccttcctcgggagaaactgaaactcttcaaagataagacaaagaaacggacaaagcaagctggcccacaatgtcacagagaagtccaggagctaaggagcacagtcatggctttctgtcagcttgggtgcctcattaggctcaagtcaagcaagaggaaagcctgcaaggtgaaaggggagcaagccctcctgaaaggaatatttaaaagccgtccaggggaaaaccaggcaaaatggaaggacttattctaaaatacatttagcaaaaatgagatactagggagcttcgaaacaggaacaaatgcctgtgtaatatagaaaagggacagtcaggaccagaccagtctcttaaacattaaaaatgacagcagaaataaaactggtaacagaaggaacagaagataaaagtggaatgaatcccagaaggggaataagacaaagatggacaataggagttcaatcaaaaaatgagagaatttagcaagtcaagcaacctatagttatgagtcttgacaagagaactgagatcacctcctttgagaattaaacgaagaactgagaaagcagaagggaagaaatgatcaaagaaataacacaagaacagtccccacaacgtggattttcattaaaaacggagtagcaatccctggaaaaggcccacgccaagacacagcagcaggaaatctcacaatgttgtagagaagtagcatgtccccagaagaatatccccaaagatttgtgagagtcatattaggccacgaataatgaactgggactaggaacaacactggacttttcaatgttaacatttgaagctggaagacagtgggttccatgacttcaagattctgaatgtaatttacctccaaaccagaaacctacacccaatctatcaagagtagaataaagacactttcagaaacacagtcacaaaaaattacttcccatgcaactctttctcagacaataacaggatatgctctatcaaaacaagagttaggccaagagaaaattacagagtccatggtaaggagaatattccggaacaacaactatagatgccgaagagaacaaaaaaatggagtctgggccaccaagccgaggggttccctgaggagaatgtccaagggaaaaaaaggagcggacagacttcctgctgtgaccatgtacatgacaggctgcacttgtgtttttcttgggcgttctcacactcctccctttacagtagcagctaatctgtctgcctggaacagttctcagagaaaccacgtggtattcttcctcatcaacttcaaggttggactcaaatgccgcttgccactgaggcctcctgtcttctcagaatgtcccttcccatcacaaccccttccccgtcccttcccatcacaatctcacacattccttcctcaatcacagtctctctcctcagcactcactactataaacactaccatgtatctcctgatcatctcctcctaccacctgtccccaccaaatgtaaattccaagatgacggaggacttttgtctgtctgttcaggcaaaataatatagtattattgagggaaaatgttttctgaatacatgaatagtcacaagtttaaaaaatgagtaaaataaaaagacaattgttaaaaaaagaaagttgctaagtaaatgaaaataaacatcatatactgcttggcacagcagtgaatacttacataatcaaaataatggaaacgctgtatatggattaatccaaaaattataactaatggtaggaaaacaa

SEQ ID NO: 493 - DNA, 20001 bp, Homo sapiens
tgacgtatttcaagttctttttagaaagagattaatgaaatataatgtaaagtgggggacttttgctgcttgaaagaatggcaatttttaaaagtacaggtaaatataccaccgcaattttattacctctgtgttttctaggtaattcttacagaagttctatcctaagccattatattataatttcataggaaaatcagttcccttggttttgctgaaatatggtttctctgtttgctgaaataaagtttttgttaattagaaatatatatttcatatttggactatattagtcagggtttttcagagaaaccaaaccaaaaatctgtattgtcactgtccattagaaaaacagaacacacacacacacacacacgcacaaatagtttatcatatataacattatatataatacctatacatatacattattgatgtacagttggcccttgaataacatgagtttaacagcatgggtccacttatatgcaattttttttctacctctgccacccctagtacagcaagagaaatccttcctctttatcctcgtcctcggcctactcaatgtgaaaaatatgaggatgaaggcctttatgatgatccacttccacttaataagtagtaaatatattttctctttttcataatttttaataacatttccttttctctagctcacttcattgtaagaatatggtatataatagatatataacatgcaaaatatgagttagttgtttatgttatcagtaaggcttctggtaatcagtaggatattagtagttaagatttgggggagtcaaaattattatgcagattttttactgtgctgggggtcagtgctcctaactcctgaatggttcaaaggtcaactgtattatgaagaattgactcacatgattgattatggtgcctgagaagtcccaagatctgctgtctgtaagcttcaagacctaggaaagctggtggtataattcagtataagctcaaaggcctgagaaacaaaggaacaaatgatgtaaatcttagatgagataactcagttcaagcaattacgcaggagaaaagtgcaaagttttccttcctctgtcttttgttatattcagatccttaaaaataaccactgactgggcatggtggctcatgcctgtaatcccagcactttgggaggtcgaggcgggaggatcacttgaggtcaggaggtcaagacaagcctggccaacatggtgaaaccctgtctctattaaaaatacaaaaattagccaggcatggtggcgagtgcctgtaatcatggctacttgggaggctgaggcaggagaattgcttgaacctgggaggcggaagttgcagtgagccaagactgcgccattgcactccagcctgggcaacaaaagctaaactccgtctcaaaaaaaaaaaaaaaaaaaatacccaccaacaacagggaggccacctttatttagtccactgattcaaatgctactctcactgggaaactcccttatggacacatccggaaataatgtttactctgaagttacttgactcaatccaattggcacataaaattaaagatcaaaaagacaaatatttttctcatcttttaaaatacacattcatgtgacactaagttcattatacaatttggagggaccaaagctaactaaaaattgagatctctttaaaaagccagaaaagcagaaaaagtacattaaatatactaaaatatgaaacctttaaatgtatatcctggtctctctttcttaaccttataatggtaattttttagctatttaatataattgtaagtaaagaaaatttaaattagaattattaccaaggattttatcattcatttgtatcatgcaatatcagatccaatgagctaactacaagaacaggggggatgctgcaactatctcaactgtttttatttcatttcttgacatatgcacattctaccagtatcttctacatttgatttactgatgaacaaggaaagattaaaataaacaaaaacttttaattccccatctgcctttttttctatgtcatcctcttcagcataagtggttggctgtatctgtattttgtagaagtttattatcttctttctctgtctggagtaggttgtagttccaatggaaagcatggcttctcaaagattttatcacccaacttactaaactatagaccacagttagctggtgcagccatacctcgttttattgtgcttcatttattgcaccatggagttatttaattttttccaaagtgaatgtttatggcaaccccacactgagtgagtttatcattgccacttttccagctgtatgtgctcacttggtgtcccagtgccacagtttagtaattctcacattatttcaaacttctgtattattattatatattttgtgggaatctatgattagcgtctttgatgttaccattgttattgtttgggggcagtatgaatcatactcatataaggtggtgaacttaattgaaaaaagagtgtgtgtattctgactgctccactgactagcaattcccctatatcttcctctcttcaaaacttcctattcactgagacacaaaaaaattaaaattatgctgaataataaccctgcgatggcctctaagtgttcaagtgaaacaaagaacatctctcattttttaaattaaaacatctctcatttttaaatcaaaaggtagaaataattaagctcagtgaggaaggcatgtagaaggctaaaacagattctcttagattctctgaatgctgagggaggtgatgaatctgcaaacacaaagttgaagctagcaaagattggtaaataaaattcaaggaaaaaaacatttcataatataaaagttcaaggtaaagtagcagatgctgatgtagaagctacaacaagttatcctgaaagtctatctggctaagataagtgatgaaagtagttacactagcaacagattttcaacgtagacaaaacggccttttattggaagaagatgccatctagaactttcatagctagagaagtgaatacctaacttcaaacttcaaaggataagctaactctcttgttaggggctagtgcagcttttgactaatacggatgaaagacttacaaatggatttaactcaaaaagttcctctgtgaggcacattataatcaatctttcaaagtcaaagagaattctaaagacagcaaagaacaaagtatcaaatcacatataagggaatctccattagactaacagcctttatcagcaaaatccttgcaggccaggcaagaatggcataatgtatttgtggaaaaaagaaaaaaaaaaaaaaaaaccccctctgtcaactaaaaatactatacacagcaaagattaacttcagaaataaagaagaaataaagtttttctcagactaacaagaacaaagaattcatcaccattatcatgacgtacaaaacaatgcttatgggaatcctacatctcaaagcaaaaggacaatatctatcactgtgtaaacatgacagtgtaaaacttagagcagatacacaaataaaaaacaggaaggaatcatgttatcactacaaataccaccaaattacaacactaaacaataagagaggaagaaaaaataaaggatataaaagaaaatcagaaaccaactaacacaatgatgaaagtaagtcttcacctacaaataacaattgaaaatttaaatgattgacattcccaattaaaatatatagattggctcagtggatgaaaaacaccgaaccaactataagctgcttacaggacacttatttctctctatgtaaggacagacagagcaacagtaaagaatggaaaaagatactccacacaaacagaaaacagcagcataaagtaggagctctacttatattggacaaaatagactttaaggcaaaaaccacaataaagagacaaagaaggttattatgcaatgataaagggcatgactcaggaagaagatataacaactgtaatttatgcacccaagactgaagcatccagatatatgaagtaaatatttttagagcaaacgagagagatagaccaaactacaaaatagtagagaactgcaacaccccgttttcagcattggacagatcatgtttacagaaaatcaatgaagaaacattggatttcaactgcactataggccaaattaacctaacaagtacagaacatttcatccaatagctgcagaacacacattcttctcataaacacacatagaccatatgttagaccacaaaagaaatctcaattacattaaaaacttaaactaataaaatgtatattctcaaaccacaattttaaaaaactagaaattaataacataacaagaacaactctggaaactgtataaacacatgaaagtttcaataatatgtccctaaatgttcagtgtttcaatgatgaaatcaaaaaagaataaaaaaatggattgaaatcaatgaaagtagaaacaaaacatttcaaaacttatgggatacagcaaaagcagtgctaagggggaagtttatagcaataaaaatgtacatcaaaaaagcagaaataattcaaataagtgaacaatgcaccttaagaagctagaaaaggaagaataaaccaaactcaaaattagtacaaggaaagaaacaataaagattagagcagaactaaacaaaatgtagactaacatataatgtgaacaaatcaatgtaacaaaaagttggtttttgaaatatataaaaaaagacaaaccgctattttgactaagaaaaaaggagagaagacccaaataaataaaatcagaagtgaaaaaagggacattacaattgatacttcagaaattcaaaggatcattagacactagtgagaacaactatatgccaaaaaattaaaaacccaagagaaaattattttctgtacacgtgaaacctatcaagattaaatcagaaagaaatagaaaacatgaacagaacaataaccagtaactagattgaattcataataaaaagtttccccaaaaggaaaatgccaggaccacatgggtttactgctaaattaaacccaacttttaaggtagaacttgcaccaattcttctgaaactattttaaaaaaattatccatatctcattttatgaggctgccattgctaagatcagacaaagacagaacaacaacaacaaaaactgaaggctaatatccctgaagaacataactgcaaaatcctcaacaaaatattaacaaactaagtccaataacacatcaaaaagataatacaccatgatcaagtaggatttatttcaagaatggaagaatggtttaacatataaatatcagatgtaattcatcacaatacaataaaggacacaaagcatatgatcatttcaatagatgcaaaaaatcatttgattaaattcaataccacttcatgataaaaactctcaatatatttggtatagaaggaatatacctcaacataataaaggctacatataaccaacttaagctaacatcatactgaatggggaaaaactgaaagccttttcttcaagagctgcaacaaaacaaagatgttcaattttaccactgttattcaaaatagtactggaagtgctagccagagcaactaggcaaaagtaagaaataaaaaagcatccaaattagaaaagaagaattcaaattttccctcttcatacatcatacttttacatagaacctaaagaccagcaaaaaactcttagaactgataaacaaattcagtaaatttgcctgaaacagaatcacatacaaaatttatttgcatttttgtaaaccaataatgaaaatcatcaagaaagcaatcacatttacaatatctacaaaacaaaataaaatactggaaataaatttaaccaaggagatgaaagatctctacaacagaaactacaaaacactgatgaaaaggaactgaagcgaatacacacaaaaaatgggaaaacatcccatactcatgcactggaagaactaatattgataaattgaacacactatccaaagcaactacagattacatgaaagacctatgaaatatctatttttttccacagaaataaacaatactaaattcctatgagaacataaaagattctgaatagccaaagcaatactgagcaaaaagaagaaagatggaggcatcatactacttgacttcaaaatatgctacaaatttattgttaccaaagaagcacggtttttgtagaaaaacaaacacacaggccaataaaacgtaaggagcacccagaaataaatctatgctttttaaccaactgatttttgacaaaggtaccaagaacatgatttggggaaggaacattgttttcaataaatggtggtacagaaactaaatattcctatgctgaagagtgaaactattatagatctccatctcaacacaaaaatcaactcaaaatggattaaagagttaagcataagacctgaaattatctggtatcagaaaacaaagaggaaatgcttcagaaaattggtctaagcaaagattttatgggtaagacttcaaaagctcaggcaacaaaacttaaaatagataaatgagaccacatcaaactaaaaagctctgaacagcaaagaaaacaacagagtgaagagacaacctgtaaaatgggagaaaacacaagcaatctattcattgacaagggactaatatccagaatgtacatgtaagtcaaacaacttagccaaaaaaagagagaaaaaaaatagatttttttaattggctaagaatctaataaacatttatcaaaagaaggcatataggctgggcacagtggctcaagcctgtaatcccagcactttgggaggccaaggcgggcagatcacgaggtcaggagatcgagaccatactggctaacacagtgaaagcccgtctctactaaaaatacaaaaagtagctgggcgtggtggcgggcgcctgtagtcccagctactcgggaggctgaggagggagaatagtgtgaacccgggaggcggggcttgcagtgagccgagatcgcaccactgcactccagcctaggggacagagcaagaccccgtttcaaaaaaatagaaggtatataaatgaccaagaagtaaattaaaaatgctcaacatcactaatcatcagagaaatgcaataaaaaccacaatgagaaatcatcacaccccagttaaaaggactaatacactgcatgttttcacttggatatgggagtctttttgttgttgttgttgttgttgttttaaagagctcatagaaatagagaatagaattgtggtcattagaagttgggcaagttagtgggaggggattataagacgaatttggttaatgaacacaaagttacagctagatggaagaaaaaacttccagtgttttgtagcagtgtaaggtaaacattgttaacaatcatttactgtatattttccaaaagctagaagagaggaatttgaatgttaacaacatgaagaaatgataagtacttgggttgacagatatgctaattaccttgatttgatcattacatattgtatatttgtttcaaaatatcactctgtaacccacaattatgtacaattattgcatgtcagctcaatataaaaaataaataaattgtcaccaattttttacatggtggtatgagtgaatttgctttttcaattctaattttgagcaactcacagtctgctctcagatccccacctatctaggttgtattgtaaggtacatctaattgatccaccaatagtaatggttctaacctcttccctagtacattttttttttctatttgtatccagacatgagcagaaatcagctaaaataaccatgactcttctacatcttttacctcaagacaaaatttagaattataaaaaccacaaagccagaattatttctgtggaattttctgtgttatatcatacttcttcattcctaagtctatgaatttggtatatattatctacatgcattaggaggaaaaatgcataaattaaaagcacagtgtatagggtgagagaaaacaactatctgaaaaatttacatacacaataattgctttggggaacaactctctgaaatcaataaaatgaaaaaaaaaaagatccttttttattaaaaaccttttttttaaagaatcagatggaagaggaattcagccatggctgaaaagccaaacgcttgtctttattttaagaaaaataatttataaatgatcttccagagacatttttcatttcactaaattcaaaaaaaatgtaatgtagttcattatctgatacaaatattgaagaacataacagacacattttctaatacacagatttcaagtttgaatgtctttcattatatctctgctagaaataaagactttatattaaagtataaccattcataaatgggagggtaggtggtgtacaggctaatgtatttgtagttttatatcatagtgtagggaatgaagttaaaattcattactgtgtcatttaagtaaacaattctgaatctaacctaccttcctttagaactttccactattttccctcagagacattctttaaatctgacctatgtaatattcctccttatgccccatgattggtttcgattttccattacacatacctaaagtcaaaacacagttcagatgccactcccaataaattcttccttattccccaatcctaaatattcctgaccacccccaaactccagttctttattccattatctgcagacctttgtgattctcttaatacttcaaataaaattttaatatatgtgaactaattgtcataaaacccacttccaaaattgcactaacattctatattgcttatcatatttataatatcaataccctaacactcacctaactagagttgtattttaaaaattaatttattcattagaagtagtcaacgtaatgcaaactttccaataaaaagttacctttaaggccgggcgtggtggctcatgcctgtaatcctggcactttgggaggccgaggcagatcacgagctcaggagttcaagaccagcctgggcaacatggtgaaaccctgtctctactaaaatacaaaaaattagccggacgtggtggcatgtgcctgtagtcccagctacttgggaggctgaggcaggcgaaacgttgaacctaggaggcagagcttgcagtcagcagagattgcgccactgcactccagcctgggtgacagcgtgagactctgtctcaaaaaaaaaaaaaaaaaaagtgacctataataacttttgtattaatacacacatattttgtgctcatgctcccatgtctttctgtttcttttactctccctagtagcttctctggctaccactgtgcattagataaagtaagaacctccatcagagactcagatttaaactgtgaaaggaattaagggatatcatccatctcagcaacaaaccattgtagttattttaactgtttccaggtcatcatcctatattttctcccatttacttctttcaacatgttgggataaattagaatcaatttattctttaattcacaagaagttcttagagtggtttcttctcttcatgttattgagctacagacatcaaatttaactgctgtctttgctgttcttttctctcttcaatctgtttctattgatgtaaccactgagctatcttctttgacctgcttatttctcaagatttctcacacaactgtggaaacgccctgtttcttactgaatgaacttcataaaacaatgaacctcataccatagaactactcaggaagacttgatatggagcccataaaaatgtcagggtttatttattagttgtttcatcacagtaatctcaagaggaataggaaaaacatgaaagaaaaaaggaataagccactgatacagtgggcttaagctttgatgtgcaatgtggaatgcttactgtgatatttattctctgtcccaatgaactgggaaatggggatggagtccataaatctacgtggttttaaaccacctcaaaggtgagagataatttaaggtgagattactggattgccttgtggttacttttgtgctgcctcatgtaagcaaaatactaaagagagctatgggcaaatgtggaaagttattccagagaagtatttgaagctgttataacataaatttacttgggaaaaaaatgtgtggaagagttaagcaaagcatatttgaaggaattaatgtcatcttgttaccggtgtaggagatctgagttaccctgagttactgactccaaattcctatgggtctgcagcaatttcagttctcgtctcctcagaagaaagaattcgaccgaggggcataaagcagagagaccaaggcaagtttcagagcagaagtggaaggttatgtaaaaagctttagaataggaaagaaaggaagatttacttggaagagatccaagagggcacctgaaggtcaaagaaagaaaaggggcatttaaccttgatcctagggcttttataggcttgcctctttaccatgattcttcccttaaggtgggcttccctcatgcgcagtgtccttcctacctttgggaattgaacacacacagtatgtttagaaatttgtgtgcatgcctatctgaggctttcttcatttttttttttttctagtggagtgtccctggaaggtcatatgtcaccatcttgtctcctagtgcacatacccaggaagtttcttctccctggaatctgcattcaatcaataatttagtgttaacagctgtggagcatcaggagattgtttctccctggctttgaagaagtagtgtgataattgtcaaaccatcacctgatgtacctagtgggtggggtcctgccatgctcatgccatctaactacctgtaataatctgtgtccactctacaacttgattggaaacattacttttctatcaaatgaaggctcccaacattctctttctacctctctagcataatttttttatttggatgtacaaaatcatttagttgtataagaaatatattattcctttggaagattaagtgtaattggtttataatataaataggttccacctataacttaccatgctatccccactgttaactttattcaattgtaaatacaatcaaagtattatttttacctagagtatcgtaagtgccagcttcttagctgaatcctagaattttctgaagattcatcttattttcatgtagtttacctaattttaaactacacattctaccctgtgtcatcttgatttcaccgaagaaggcctataacttcccacggtttatcacttgtgttttcaaaatgatactatttcagccttctctagaaatgtcttatgtccttttaaggataaaataacatattttttcccaggttaaaacgcttttgatttctgataaattttggctctgcaaatctcatctcgaattgtaattccaacgtgttcctattgtgggagggacttgtaatcttcacgtgtcaagggagagaggtgattagatcatggggctgcttacccccgagctgttctcgtgatagtgaatgagttatcactagatccggtgcttttataactctgtggaaattcctcttttgtccttctctctctcctgctaccttgtgaagaaggtgcctgcttccccttccaccatgattgtaagtttcctgaggcctccccagccatgcagaactgtgagtcaattaaacctgtttcctttataaattacccagtctcaaggaagttctttatagcagtgtgaaaacaactaatacaatctccttgttatttcatccccaactatcttccttctttttcactataaatacttcaacagtaccataagttttcaatgtcaaaaaaaaaatgagataaccctacaattaggtgactaatcttaattatttttcactcaagtgattttcatctccattcccttttagttatttttacaatgtttctcactaaaaatcttataaccacccaagggttttctacttcagtatgttaaatttaaaaccctctctctctgtcatctcagctattatctttcaaagtgtctcacattttctataacaacatttcctgcccctttaggttcagaaccacaggttctaatttgaacttctctgtcaccggtttttgtctaatctcttatactctaatctaccctcacagaaagcctcttcagattgatatttaaatgcagaatccctgtttatacacctagaaactggaagaattggatagaaaaggccactccaggtctataacatgggaaactacaaagtcatgatctccaaaataacttgaaccattgacattccccttttagactttgcttaccattttgttcaaatgtctgaagaaaaacaaatgcaaaatgtcacccctgacttcaagattcctctatctctctacaacttcaccctcaataagtgctcctgattccaacctgatcaagaaaattaaacaggcatctcttccctaaattctcataggactccataggcacaaaatgttatcttgaagaagttttccctaattttcttctaaagcttgacttaaatatggattgttctgggatataaaacctggacaaactacatctcaatccacattatccaaaaaattaaaaagctatatctttgtcaaatgtttatgaatgtttgagattattaatttaacttcaagggtattcttatataaggacataataatcacagaaaagttttaggaagttatcttgaactaatttgatgactgaatttattggtaactttaagaataaatcacctagaagtttccttgatttagcaagtgtaataattttatgtaataatctgaaattgaaagttttcttgtagattataaaatgatttatataaaataatgaagtttatgcagatcatcatggcttctgatgttacattatctgaatacatcatccagagagtgttgttttcctgtttctaaagtgaaaaaataaaataagcagtaaaaagtgaataaatacaaatagtaaaatacataactgaatcaatagacactgagaaaaaatgattatcttatctgctttatatatattcttattaaaattatttcaattataaaaatgggaagataaagttaaaacctgtaaaattgtctaaataccacccaaaaatatgtaaacaggttatctggacaaataagtggcagagggacatttttttaccatagatacttttctacatgatatgggattttagctaaggttcatggatttagcacaaaaaagagcatttggtctttgcatttatctgcttttctaagattataatttaggttaactattcattaaaagtatagccaagcaaaaagatgaaattagcaaagattggattggcagaattattttcttcttccacatttaaatcataggcatcaattatgcagcactctgcccaggtttactaaataataagcagcatttttttggtcatcattgttttccttctaatttctcattcccatgctgtcaaaagctataaagaatcttttcttgccaatttttcctatgactatgaattccatctattctatgtcccggaattcctcctgtaaagaaaatattattaaaatgtttgcaacattaaaacaaatttttttctattcacaaagcaacagcaagagaaagtggaacagtgcagaaggcaataaatattctgagtctttcctgaaaatagctctttgtgctttcagccttcagttggtgcacctatgttaaagttatgttctaattaattactgaaattaaaaagtgagaatatgagacaagagatcaagtatttggaaaggtgttgtatttatggacctgccttcatgatgtcctctaggtttcattgtatgcatctgtgaagtaaggggtcctgtgtaccataaaaccttcaaatgaccttcaaataccattgttgcaaaaacctgattaataactagaccaaaaagcttctccaaaatttgtgaatgtctgtctctgtaaaattcactgaatcatcttttactttctcagattttgctttacaaaattttgacttaactgatgatctatgtggtttgtttgtttgtttgtgatggagtctcactctgtcgcccaggctggagtacagtggcgtgacctcggctcactgcaacctctgcctcctaggttcacgccattctcccgcctcagcctcccaagtagctgggactacaggtgcccaccaccacacccggctaattttgtttttgtatttttagtagagacggggtttcaccgtgttacccaggatggtctcgatctcttgacctcatgatccgcccacctccgcctcccaaagtactgggattacaggcgtgagccaccacccggccaatctatgtctttttaaaaattatcatcagtaaaacagtgcatttaaactctgtacaacatgagttttacctgcaagtgtccacttaaatgcaaattttcttctgcctctgccatccctgagtcagcaaaaccaatccttcctcttcttcctcctcagcctactcattatgaaggctgaaggataaagacctttatgatgatccacttctatttaatgaatactacatgtattttctcttccttatttattttttcataacattttcttttctctggcctactttattgtgagaatacagtagaatttttatatatcatacaaactatatgctaattaactatgtatgtcattgataaggcttatgattaactgtaagctattagtaatttaatctttggggaatcaaatgttatacatggatttttgactgtgctggggtcagtgttcccaacccctacactgttcaaaggtaaaatgtattttaaaagattttgtaaatacggttgttggaaaagttttccactatttgtaatttctttaaaaagaacacatgtaaaaaatgatctgcagcttatttttattttattttataacttgttcattttgaaatagagactatcaaacattttcagaaataacagaacacgtttttatataccttcattcaccttccccaattgttttaacatcctgcataagcatagaattcttagccaataaataaaataatattgtatcaagttaaagtaattgattagtaacagatattattaactattaactaatcaacacatttcagccatactgtactagttgtttgctagtctacttttcttacttttactaacattttcatgcaagatttcacattgcattcaattgttatgtgttcttaatctgctcccatggggaacaattttttgtcatgtgagaaaatgttcagtttctctttatctttcacgatgacacttgagaagtactggtcagcaattttctcccccgtcttaaaactggcttatagtcattgagagtaaaaagattgaaaaaaataagaaacattatgaaaatctgtcacattaagattaagaatcttcttcaggtaaaatgtgcattatcttgttcttatgctatgggttacccgtgaactcctcttttattctcccatttatgttatgtgagtaaagcacatttgacagatagagacttttcccttagttttttgttttgttttttacttttaaaaatatctacttgttctcatgctctttttctaaacaaaagaaaaagtaatgaaagttgtagcaaaagatggagaattgtatatccctaaagaattgtatatatctacattatttcattttgttattgcaaacataatattttgatagtttagttgttaatatatataaacatgaaatttgattgtcgggttgcttcatttaatatttgttaactttgaaatatagggtttgggtttcatgaacactaaagacactttcctttctaactctactaagcctttgtctacttagaaataattcctatgatgttagagttaatcctcgatcccaaaatggaaagtcatcaatatactatccaaatatataaccaacaaatttaatgataacattgattatcctattccttcactttagcattttaatatttttcttctgaacaataaaaatagtcaataaattggacactttagaaaatagaaatggtgtcaaccaaaataaaatcagaataggtaagatagataagtgttttgataaataggaaattagaaagaactttacacagtctccatataactgagaatttattttgggctcagaaacctgtgactggcataggcactttatgaaacaatattacatctgcaattcattaaaataacttgtgtttgtggctgggtacagtggctcatgcctgtaatctcaatactttgggaggtcgaggcagatggatcacaaggtcaggagattgagaccatcctggccaacatggtgaaaccctgtctctactgaaaatacaaaaataagccaaacgtggtagcacacgcctgtagtcccagctactcaggaggctgaggaaggagaatcacttgaacctgggagacagaggctgcagtgagccgagatcacaccactgcactccaggctgggcaacagagcaagactccatctcaaaataaataaataaataaatatcttttgtttgaatctagaagcagcatagggcaaatggtgtttagatctcgtaatgctgtttaatcttagtataaaagacaagttacaataaattataggcaaaataatattaatattataatagagattattcaattctacactgcaaaccattcctttttttttaagtgtcttaatttttttcttaaatacttctgttcaaagttttaagcaactatgttaattaaaattctacttcaatgattgtacttttccacattttcccaaaactatccttttgtctggaacatatgaagcaagttttatataaatcacatttatttgtttatattttatatgcaagaagctgtatcagtttaaagaatgatgggttagttttgactgtttatatgcctatgaacacattgccacaataaagatacaaaattttgctatcacccacaaaggttctctttgtcccccatgcagtttatattcttccctgtccccaaggtcaaggagtcaccaaaatgttatttcattataaagtgtgtttgctacggtctgcatgtttctgtatttctaaaatgtatatgttgaaacccattccccattgtgaggttatttggaggtagagcctctgggaggtaattaggtcattggagtgaagtgctcacaaatgagattagtgcctttaaaaaagagctcccagagagctgctgtgacagttaatattaagtgtcaacttgcttggattgaaggatgcaaagtattctttctggatatatctgggtgtttctgggtgttgccagaagagattaacttttgagtcagtggactgtgagaggaagactctttaggaagacctattcacaatgtgtaaggcatcataaaattggctaccagcacagctagaaaaaacaggcagaagcaggtggaaagagctattgacttgctgagtattccagccttcatttttctccctttctcccatgctgggtacttcctgcccttgaacatcagactccatgttctccagcttttggacccttggacttacacccatggtatgccaggggctcttgggcctttggccacagactgaaggctgcactgtgagcttccctgcatttgaggttttgggactcagactggcttgcttgctactcggcttgaagatggcttatcgtgggacctcactttgtgagtcaattctcctaataaactccccttctatgtacatctatcctattagttctgtccttctagaggctcatgactaatacagcggctttgccctttcctctaggtaatgacacagtgaaaaggcaccattaaggaaccagaaagcaggccttcatcagacctacagtctgtcggcaccttgattttggacttcccagcctccaaaactatgagaaataaatttatgttgtttataatctacctagtttatgatattttgttacagagccaaagcaggctaagactgcagtttctagaattttataaaaatggaatattatagtatatattcctttgtgtctgatttttctaacttagcataataatttttaaaatctttcatgcttttgtatgtgtcattggtgtattacttgtattactgagtacacttctattcacccgttggttggatttgattcaaattcccgtctactgtaaatcaagttctgatgaataaccggctccaaatctacgtgggaatatatgatctcctctgtcttggtggaatacttaggcatggaatgtcaaagttagagtgtatatttatatttgaatctttaatgaactgctgcatacttttccagagtggtgtaattccattttacaatctcgcctcagctgtgtaggaattacggttgttcttcattgttgttaacacttgatattgtcatgtttttgttgttctttttggcacttttgaagggcataaaaatggcatcctattgttttctcttaaattttaataattaatgatgttttcacataggcttagttatccattagtcttattttataaaatactattttgtgaattttttggggtagtagagtattatatataagatttttaaacatattctgaatacaataacttattcagatgtaagtggtgctacatgtttgctaattctgtggtttgccttattttcttaactatgtattttttagagttttaattagaaaaagcatattttttaaatttttattttattgtttattttttgttttcatgaaattgtctgataatgaaaactgtgaaaaaaaatatttgttttttaagctatccagtgagtggtattttacgatggcagcttctactaaagtaatttaatatattttaaagttatttgtgtatatcttgtttttttaattgatcaaaataatcagtgcttctttagtactgtttgttttgttaatcatagagtttactattagggtcaatgaatgttagcaggaaaagaaattaggattattattttatgtttaaattaaaattaatatgtttaatatgtttaaatgcctaacattcaagaaatagataccaatcaacttaaaatttaacaaggcacattaatttcccttggctggggaaaggctcatttaatgtgctaggggacaatcataatgagtcataagttatcttcagtaattaagatcataggtaacaacaaagataataaccttataatatttaatagaaagtatgcaagcattggctttttattctctatcatgtcattcattaacaggaaccacttacttattttttcttagtggtatatcctagatgtttgcattttgtattgcatattcaagtaaatgatattatttatagtgtagacttttgtttatgattgccccatttgagaacacacatttttagtaaaatatgaaacaaatttgtttaaaccacttgaagcctgggaatttcttcagctctggaatcagaaaaccaaatgtaacattctagagagactttagtgtatttatttgtaagagttatatagccaattgatatggtttagctctgtgtccccacccaaatcttatctcaaattgtaatccccatgatccccacatgtgaagggagggactaggtgagaagtggttggatcatgggggcagattcccccatgttgttcttatgatagtgagttcttataagatttgatggttatttaaggcagttttccctgctcttgcttgctgtctttcgtctgccaccatgtaagatgtgcctctttagccttcggccatgattgtaagtttcctgaggtctcctcagccatgcggaactataagataattaa

SEQ ID NO: 494 - DNA, 40001 bp, Homo sapiens
ccagtaaaaaaaaaaaatggcttcagaattaaaactatgaaatattttacagtttttcttgtacagagtacttggctgttagcccaaggttaaaaagttcataacagattttttttggactgttttgttgggcagtgcctgataagcttcaaagctgctttattcaataaaaaaaagaaatgaaaaagatatatgaatatgacaaagtattgctgagtccaacaatgttgttttaagactcttaaaatacggtacctggcaatgtttatttcataaagaattgtgaacttcttgaatctagggagggggaatgtagtgaagggatgtatcaagtggggtggtgggagggggaggcaaggttatatgcactttctcatgatttacagagaagtgaataactgcaaagtgaagttgcttcttctacttcagtcttctctcactttgatttgctagttgttatcaattaatgacaattacaaacctactgtatctctaatacagtgtgactggtcaggtatttcagttcttaggaaggaagtgccaagtttgtttttgggttcctggaacagcgctcacctttgtttagaacactggtttaaagggataatcatctctgtcacattagactatccatcatgaccagcaaatactcattttaggaaaaaaaaaagcatgatctgaaaaatacttttggtggtatgttggttaccctcctagctttccatttggtttagaacataaagcaaatagacacagtcatactgtcactgctctggactgtgtggagctcgctaaagtcatggtcattgcaggaatccaagtggcagtccttctcattcattctaatcattgtatgtgcttcactacgggggggagaaggaaacgttagcatcatgtttcccatttagggcaggagtgagaggtctctcttcctgatttagatatgcaaaagctggtatgttcagtaggaactgtacatgtgttgggaggcataaagactaattagcaaccataatatggtcactaccctaatagactaaatgaaatcttgcaatttcaaattactctttctccatattagatttacccacagctatatttctgtttaagtactagggtgagggttttctgttactttgttttttaatgttgttccttttgaaagaatcagtcttgcagctgagtgaaaaatctgtggaatgtattatttgtcctctttacatgaaactactcatacttaagcaaaagtcagtcttatagcaagactgttagccctcaaacttgactctactgatctgaccatttccctctcatcgccagacaactgacgatttccctggttttagtctgcgtctctgctttaaagttattgtgatatccttctagatcatacacaagtctaacagttaattagttaacagtttttaaactaggtttgtgggtatttttttggtagcacatgtatgctattacatacaaatttttatttctaaaatataagatctgagattgaatattttcattaaaagctacagttttgtgaatctttgtgcttcaacattctttgcaagatgatacggtatttaggcatttgccttatttttgcatctcacaaacataagtgcaatagatcttttcattgaacagcaaagtaggattcatcattccatatgacttgagttacaccagacctgttctgcccaatgcctttttgattacagtgtagcttgcccaccgcatttgtcgttttagatactttgctagccggccactttggatttcatcagacagtcctaacaatattgtctgaacggctgaatatgaatagatacagcagaggcactcctgatatatgatttttatccatgcgtcagtttttcccacccagtgtagcatcctaaagataaagccagaagctaagctgcagtgaggctgtgattgggcgtagaagtgggagcattgggacctcacattacacacacgagagatcataaccatgtgaaaaggcaaaaagcatgtgtttgcaacatctgataacttcatggcctttgataaatgtatatatgtatatgtgcatggactgtgtttccagtacacctttcagccaaaacagatccacagtagttgttgagttcaagtacataaagtacataacaagcgaacgtctagtacaattcttacttatgtgtatgggatttttccctttgaggttgctttgttttgtcttacaaaggtgaaaattgtttgtaagtgaagtgagaagttcatatttctttggcttttttgtgtttttaaaagttactccttttagggagctggtctgatgacttgcttagcttggaaatccttgttttcagtgtgtcgagtcaaaatgtgtttatgtgagctgtcactgtggggaaccaattgctttgtcatatagctggttatgaactagtaacatgtttgggaagtcctactgatgttcctttggaagaaaaaatctgctggttttaacaactgtgcttttgctatgtatggtatccaagttagttgaaacgcagacactgagatctgtttgagtttagggtcatttttagaaaggggcagtttaaagcacaatgtctcacatgggacaaagttccaaaatgccaaattcttattttttaaaaagctagttctataaaatactggtattatgggtggggaggaaatagaattgagtcaattggaaagactatccaacttaacatgaaacttgtcaccatgagatagcattagctgcccaggatgctgctatatatatatatatatatatatatgtgtgtgtgtgtgtgtgtgtgtgtgtatatatatatatatatatatatatatatatatatatatatgtgtgtgtatatatatatatatgtgtatatatatatgtatatacatatatgtatatatatgcacatatatatatgtatttaaaaaaatcaaaacaaaaaaaaactcatttatacctgtgtattttttaaagctacaatctgttcaatgtttttaaaaatctgtttatatgacattgttaaaataaagttggtcttttgacgagagggaggatgtcacggtcagttgtaactttgccttcacaaggcaactggggtggggggtgggggtagtgtgcctccttgacatttcgttcaagttatagattcaatggagctatgtcttgttttaagttgctttaatgcattgtattagatcttcaaacagaataaaggttgttttgaaactgaagttttgggttgaaatttcacttatcacctaagaaatctttctaaaacagctaccttttggcttataaatgttgctgctatttctgttgtctcccacccactcccttttgattgttatcacagtatctcatttttgtaaagttgagaaggacattgagtggtcacatgtaagtaatacatatgagctgtctttcataatttcactgttttttgagacggagtcggagtctcactctgttgcccaggctggagtgcagtggcgctatctcggctcactgcaagctccacctcctgggtttacgccattctcctgcctcagcctcccgagcagctgggtctacaggcgcccgccaccatgtccggctaattttttgtatttttagtagagacggggtttcaccgtgttagccaggatggtctcgatctcctgacctcgtgatccactcgcctcggcctctcaaagtgctgggattacaggcgtgagccaccgcgcccggccaatttcaccatcttaaatgaggaaatacacctaggtaatgtcccttcaaggcacgttctcgctataggaaaactagaatgcccatcatccttcaattctcgcctcctccgcattcatacccaaaccttgagaatcatcctctaagaacgaagtgtccagttttgtctctgttgtgcagtctgcatattttgaacactcacagtgcagggatgacatgggactgtagacagggagctaagttacacctcaaatgcagattttacattgtatcacctagtcaagatacacaagtcttactgtaggataactttcccatttgttttgattgctaagtggacttaaggcaataccactttgcatgtatatggtgtttacatgtagacacagtgagggtctagacctgaaagacatagtctagtagtagaggggagagggacgtacaaataattactctcagggcaacaatgactaatattttttgagtatggcagtagctcccagactgatgttctgctttccccctgctctgtttggtatcacagagaactatattcgctggagcgcttgtcctggggcttctaggtgtctcttccctggctctagctcctgccagatagaccctcattttcaggtctgagcaaaccccctctgctctagctctcaggagaaggctctggaaacattacctactcccattttttactccagcccaagaagtggttgcagctttatgctgttgctaaacgtctggtttccctcaccacccccatttggtttctgaacccttccctcactcaagtaattatcattcaattattccagtaagagctagggtaattccccccccacatacacacactggtctctgacatatcaagtgattattatctgttaaactctttgttttactctttccacaattacctgggtaagatgattatattcccattctttagatgagaaaacaagcatagatgtgagatgacttgctcaagatcatgcagcatctgagaacagagttgaacgcataggcttctcaagccagagctctttgcccctatgctgtaatgtaatagactttcaatggaaaatgcacaagagaatgcaaaaaaaaaaaaaaaaaaaggctcactggtaactttttgctggggaggtaaccatgtggctttcaattagtagacagtgcacaggtggtcaatgatgaatcacaggaaatagcctgggcttgctttaaaccagtggttcccaaagtgtggttcccagactaacagcattcacatcagcatcacttggaaacctgttagaagtacaaattcacaggccctacccctgacctactaactctgacactggagcccagcaatctgtttcaacaagctgagtgattttaatgtatactaaagtttgaagatcacgactttagatcacctgcttactgaaatagtacttctagcattttaactaaaaaccattaccattaatgagtgatatgttactttctaatttattttcataatgtaggccataggaaaaagaaaacagattgatttgcagtttaggaggcccagtctgctctttttatctgtctttaaccagctgtgggaagtgggccaattcaaggcaccttccaggcctccaactccttatctgtgagataaaggtatgggcctctgggactccttctagagcatatgctgtgattaagtgagctgaatgaagattcccagtcccccaattctccatttacaacttgaccaccaattttaacccacaactaatggtcctttatgttgccagtgactatggccaagtgaaagcatgcctcgaattggggtatacttttcttgctgacatcttaaaagtgacacttgaggcgaatctaaactggcagccaagttcttgacagtgtggagagagtgtatttggaaatgacactctgcccatctacctaaagcgtgaagtgctaagagaatttggcctaccaaaccctctggggcatggtgggaggcaggaaagtagagtctgttaagacctgatacaatgtcagtcaatttcaaaaacccttttttttcccccgaacttgtcccttaaaaggtctatttaaaaataaaaatcagttgcaatatcttaaagagacagaattgattattcactctccaaacttcagattatcttctcaaaagatagcactttgtaacctccagtttggtattgctgtcataaatcaactcaacagaaaaccgctgagatgctttgggggagggagggtgtggaggataaatgagtaatcaccaacatgctaatctgcattttgctttccagaaggaaaagagaaattcccttctctctgtagcactcaatcataagagtctgaagcatcacctcaggcttaacttgttaaataaaatattctaaatctatacctgtcttgacaggtgtaaaggtttggcctataatatgagaacaggacagtcaacctctaactaccaccactaatcacattaggaagaaagttacaagggaggtctattcatcaccaagactgctcattagaattatagttttgactgtgaaatataccatacgttgtaagactaactcgctggaaccaatttatttatggagctctcatttcagaactcagtgatttatagtccaaaccctcacaaatcaaaaaatatagataacttcatcacaatggagatgatgtgctagtcactttatgtcatatttactgtcctctaacagaggcccagtgccatgtttaaaactatttaaaatagttttgttgacagtggtgatgatctgtttctttggacctgcgaggataagacatccaacgagatgtctaacgtactgattcattcaaagctttattgagcacctactatttgctggacactatttccctctgaaggtccagtgataagacaggtgaaatcaaagattacagtctgctggtgaaagcaaactcaaacaactgccctctatcatgagatacagagaggaatgaacactaagtctcaagcaggcctgcatgagcagctaggccaagcttcagagaagagttgacatttcaaatgtttcctactctagtaaaacaggcccatgtactcctggtggttgctcctcccaccagccttcatggaagctggttctattgaggctagaccattgtacttctttaatataatcacttttcaggtgacatgtttggtttttcaatactgtcaaaggcattatctccattataagttctctagagttcaatgttcccatctgcagttcccatgctgcaggtggttcagacagctgacatcacacacctcagcttcaggcaagccacttttctccctgtccagggacagatgccagggcctcacttggctctttgccttggcacattagacgtgatctgcatgcaactgtaccttttccttttattttagatgagaaattctcaaccctagctgaacattaggatcacctgggtatccatttaatagaaaacctgacttattggagtctctaggggtgagcattaaataagatgtacagaatgcacctgcaacatggctggcacttaataaatggaaggcaataaatatagttgttagtcagtcttgcctatcaagattagattccccaaaactatcgctttcgatttcctgtcgtttttaggatagggctggctggacacatggtaaatcacccaaaatctgtaacttttaagatattttatataagatatttatatttattcatatctgtacctactttcaggaagtatttaccttttattggctcttaggcacacagcattgatttactcatccaatggactaaaaatcaccaatttatgtgtggctggctcttctattattctgaaatattgtataacattaaatacattgaatgtatttataacattaaatacattcaatgtatttataacattaaatacattgtatacattaatatacactgtataacattaaatataagtatgacaaaaaagccatgaaatagacacaaaacaagtagtgaaggaagaaaggaagggagatgttattgaaaataaaaaccaattgtctctaagtttcaataattgaaagaaaacaaagcttcctattagccaggcaaaaaaaaaaaaggggtgcacaatgctttcatagttccagtgctctgggagaaggaacttgtcagttcagtgtgaactaaacgatcctctggccctgacacttgagaggaatctgtcaaagggatctctgtaagtggtagtgcctcttacacaatgttcgattagaaatggttcttcagatatattctccatatggtgctttcttatttagtctgtggcagaagcagaatattgttctagaaaggaggttctgtgatgttggctccagaactctgctcgaggtgcatcttgcctgtttcctagcactgtttgggctgcacccacttcagcatgccggagaaagctgccctgcaagttctacagaaggaaaggccaacaaaatcagggccgctgcttatttgctagactgttccaggccagcagttcggtggtgaatcttcgggaagtctttgtgacatctcaggcagtgccaagtctcaaagctgtgggggactagacactccactcttttatccagacatcagctttgtctggtctagagcccaacttcatgcagcactgtgtttcattcatcattttccccatagaagatcctagttctagttcattttactacctttaaaattttatctctcaaagatacattccaatgatacattttaataacaccccgtaaaactggaagttcaagttttctggctttttccccaaggagaagggttgtcatcaatatatggaacttttgaggaatttctgcaaaagtctgtaatcacagtagaatgaaggaaattttaaccagcctacaatacataagggaaattgtctctggcgagtggctgtaaatccttagcagaactgcacagtgtattctcccacatctccctagtttagagaaattgaggctagaactaagggtgaggcagtaagggtgcatcggaaaaccttcaatcattagctcttccgcatgtcactgaacacagagttgggaggaggtgcacagtagcacaccagtatatagtattgccatcatccagatgcaatcaatgaaaagtaatctcaagagtattgataataaagtaaaacaattaggaagtgatgagtttttagtatttgattgtaagtttatggttttttaatgatgcctgtaattataatttgtgtgatattaagcttgtatcatttaatgtttaataaaagctgtgtataacagccagctcacaaaatgcccgaaaagtgtagccatcagctctcagggtttggtttgaattggctccagcacaccctggcagttagaaggggcaaaatcttaagtttaaggatgctttgggaaatgcattggatgccagtgtacaccaattggctgtgatctcacatccggcttctgcttggaaagatggttgctaagaaaaacagaagtagccccataccaggttcctaacaaaatcagttaggaggagcagactatgtcctggcatttaggtctatcacagtaaacacacaaaaaaatttagtgcaagttctcccttatccccttcacagaaaaattgtttcctatctagtctagaaaaatcaaaccttttagagtttaaatattttaaaattaaaaacttttattaaaaacatacatgtaactcctcacccctttccaatatctgggattaaaagatttgaacagagacctgtataatctcaggcaaaattcatatggattctcattactcagtcacacagtaacctccttcctgctgcagaagctttacagacaatcacagggcatatgaaatgttttagtaatgaagatgaagggttggagcaaatgtctccatacaaaacaaattgactctaggaaaaaggggaaaaatcaaatcaatgtctctgaaacttgagaaacttgtatttattaataggaaaaaagttttgagctcaggtctaattgctatcacatgaaacactattagcaaatttaaaaatgaacggttatgagtaaaaaacaaattggatgctacagagacaaattagtaaaatagaatttacaattcaagatatcctctcagaatacggacagcaagaaaaaaaagatgacaatgataagtaaagagacgacctagagaatagattgaaaagatctaatacatgcacaataggaattcaggagacagcagagcagattgagaagtactaatcaaagaactgagagaggaaaattttcttgagttaaataaggattgcgcctacacatagcaaggacccactgagtagccaaaaacaataagacccaaattgcttggtaacttttcctagggttcaagaagaaaaatttataggtaaccaaacgaaaacaggctactactacaaaaaaattgttttaagccaagtgcagtgtggcacatgcctatagtcccagctacttgggaggctgaggtgggtggatcacttgagcccaggatttcaagcctagcctgggcaacagagcaagaccccatctcttaaatttaaaacttaaaaaaaaggttaataatgactatccttcatagcacttaatgacagaaaaaagattgtggcaacagctatataaaccaaataattgtttatgtttggaggcaacaaaaatttaagacataatgccaaagagtgaccacttttaccttttcagagaaaaaaaaaaaactaaaaatcctccagccaaatgaaaagcaaataaaaagaacacaagtaaaaggaagttgtcttttaaaaatggtagagaacaataatagcagtaacagaaccaatatgcaaataatagttaacatatttatgaaaaataatgaaagacaaattattgaatgagaatatatgtaaagataaattaagatttaaaaaactaggatggatgtaaaagttcaaattgttccaataattctgagagctgggagagagaatgaataattaggcaagtgtgtaaatatttagaagcaatgatgcttattggtacatttaatactgaaattaatctaaatcacttattgaataaataatgctatagtgtaagtcagaaggaaaccatcagcaattaaaaagttatacattaatatcctattaattggcatgtaaataaatctatatgtatatattcaaaatatatttttaaacaatgaaaaattatcccattttattcaatgtgtgtatacagctatatcttatagagtatgtttatgacaattctggaagtctattgggtttagttaataaaattacatggttgatttttttgaatgtatgtttttcctcagcaagcatggaacactcacagaatttgaaaagttaaaagcaaatgtctaagaaagcacaggacaactttaattgggagtgtcagaaagtctttgatgagataccgtaaataagtgagggaaaagattttgaaaggcaacagactgcagcaggaagaaaggtgtggaggggtgtgtgtgtgtgtgtgtgtgtgtgtgtgtgtgtgtttgcgcacgcacatgtgcagcctcagagatccaatcacttacctgaagaacaagtaactgggttactgtggggaaatttaagagttcaagagcacattcagatggtaccttccaggttttttcttgacactctatctttgtcctacctcaaccttcccttctagcccccatcatttgctgatgatagagacagcacaaaacaaaatggtcttaccaaaaaagacagtttcctgcccttgagttttccacagtgtccttgaagtccaaacttctttagaacttgccaaagtccaagccagtttactccagacaatggcaaccctgaacccttcactgagtctaaaggtcattgtttaaagtttttatcttcttgccttacataattcttgtatcttctgctgggggtggggggatgggggagatcatagtgatttttagctcaaaaatctacttaaagggcttaaaaataacaaaatgctggaagttatttacacactccaggcaaactgatttcaaagaaactttctcaaggatcctccttagcaggtaacacagctttgagagatgacattccctactgatagatgtaacaattggattctggagttaagcaggcatccctatggtggcatgtaaagatgaatataataatatctgatcacaataatgatagtaataattacctctcaggccagtaaatgcttactatatactaagcactttgcatatgtcaccttgtttaatttttattgccctcaacttaaagatgaggaagctgaagcttaagtaggttatgcagcaggctcaaagttatgcagctggtttgtggcagagctgggcctcaaacataggtctacctagtgcaagagcccttgctgtgacacatcatgttgtgctgccccaacttatacaaaatggcccagccatgtgtcacatcttagggatcagggacctgtgacaaccttgtcgttagagttacggattcagtgatcaattcttggtgcatccactctggaaggctattcttcatcccatctgctacatttccatctattcaagcactccccattgacctcaattccaccaaccaagcccttccacaactctccagctcttgctgaattgacctcactgatctttcagtgcatttactctctaacgctctcatttggccttagtcttcaacaagaataatcggcaaatatgagaaaagccacctaaaagtcacttaaatgactactactaaaagtctgtaggtagacagttgctggaattggtttggtagtacaacaatgccatccaagactgtggttccttttaggttttgctctgtgtatgggattttcagccaaatgtttactgtttcatgaccacaaggtgactgccccactccagccatcacatttgtattcaggcaggagggaaaaggagcagtgccagtgagctctcctttcacacctttctcttttataagggaaaggaagctttctgaactgcctccaactgattctacacctcactgaccaggactgggttatgtagtcacttctagcttctggtgaggccaggaaagcaaatagctcacttcttttgcatctatactgggaagtgggcagggggaaggtactgaatgcctctgggccagactgtcaacagtatctgccattgttgtatttttcagctctttttctttaatgctttgtcacccctaatagactcttcatcgtgcctctctgattctcaccattacctcagagttctggggcacattgttggtattgtaaaaatatctgcaaaatttaattaagtacaaaatacatatcctagaaatataaggaacattcttttgacactttatttgataaagttttgactgagatacaacctttgagttgtgaaaatatattgagaaaacctgtgagagattgcaccgtgacttcattgtatttccccactgcagaaaaaaatacaatgaatggtgtagaaaggaggttgctgggcccaacaccttttgttttggccaccttttatatcaatttctgtgatggctgacccccttacagaggctgagcaggaaaatgcacaagaaatcaggcttatatttgcttttcactggcaagactgatgacaggtatgctgaggtggaaatttcaaactattgactttaacttacttctgtcttataacaagcacagtgagggctggccatgaagctgctgccttagtgcacctgaagcttttctgagcttctttgctaaatcttaactcactaagtattcacagcatttctttgcctcctcacgcctattacctgcgctcatcctgctcttccaaatggcctttggaaaaatgcattttggagtcctatattcagagaacagtaagagatactgggctgagaaacagcctgaatgttagccaaagtcttttcctaagacagtagttccaacttacagcaacattctgagaacaataaatctaatgacacctgcagtagcagcttatgaaatggcctctaagatggctcctaatattctgatttctggtattcatgttcctatgtactgtaagggaccgacttacatggccaggggaaggcctgctgagggaagcctactataagtcatgagaacaccaaaacagctctatggagaggtctacatggtaaaggactgagaccttttgccaaaagctagcatctacctgccacatgagtgcaccatctgataagcggatcttccagccccattcaagccttcagatgacagccctggaaatcatcttgactgcaacctcatgagagttctcaaactaaagcactcagctaaactgccctcaaatttctgaactaatgaacctgtgtgagaagacacatatttgttattttaagccactaatatgctcagcattcattatgtcagttgatcctcatcactgcctaatatgaagtagaatcagtgtaacaatctacactccaccgatgagagcacactggctcagagagacgaaacaacatggtcaagatcgtattgctaatacatgttgcagtctggccaagtgccctggttacctgatttctagtttggaatgctttctactgtggccctctgctataccagtggggcataaggaaaatgacagagtcctcatttaattccctgccccagagtaatggatcactagcttaatagactgagttttattcaagttgacaccagcttggatctctagcccctcactgggatcaaagagatagtcttcttctgatcgtctttgtttctctccaaagaaggttttgaagtaactaggggaagatgactactctagatgcttggtcttagcccatggttacatttgtggtgtgtcactctcacgtggttcaagaccttcccaggtatttggagtaaagttttggacagaaaagaaactcccacactttccataacttctcctcctatcctttccccatcatagctttttttgaatactaccctccacttccggaagatctctggtttcaggagacaagaaatattatgtggccactaaattatgttcacactttaaattctctgcttagagggcagctctccaggctttaaatgttgaccatgtttactcagcacagaccacatcaaagaaacgaccatagacataagagttttaagcaacccctttcttcaggaaaataaaacaggaattaagttgggcatgtaggtgatagcaaactattctggccacctttctgcaattgagatctgccactgtggtagggaatgtccagccaaagcctgctggccaataccaagtcaaatcccccactggtccacttttccaatcggcaggtttcgtttcatattcacacagaggagtggagcaaatacctagggtcaaatggggcttcaacttatctaatgcacactgcctttggataattacaagctgtcacagttggaaaagttcttagtggtatagctcaaccattgcattttacggattaagaaacccaggactaaagggtaaaaagaagcacctaggtttgatgacaaagcaggactatagcttccacacattacatggcctcacctgtaacctactcaccttgctaacacacaactcagaacacttccccttctgctgtccctctacctaaagttcagtttgaagattgactgcatcagggttttggagtaacctgcccttggtctctccttaatggaaatcagtgtatggcagatgcatctgaccaatgacttaatgtaagcctacctcaagtatgaccctatagtcaagaagaatgtgtgtttggagttctaagcctaaggaatctaggagtggccaacccagagattcattccttgtctagaaagaacatctgaacctccggcccatcccatggaatgcaggccatacaggggattgaggctctttgttttaggtccagtgaaggttatcaggtggagtttgctggggtgagggtcctaagtgaaaacgctatataaactgcatgctttttacaaagggtagtggttctcctgtccagcccactgccactgcaccaccctgtacataagtcccctcgaccttatatcttgttcactggctccaggtctcttcttcagcctcttgaacatgatgccatccctattgaagtcaacaggggtctggcacgaagattagctgcagtattctggagtatcacatactacacatttttacataacccctctgtgactcagtttcttcatctataaaatgggtacaatagtgtgttgagatgttagaaggattaaatgagaaaaaaatatgtaaagagcctgacaccagaaaactcccagtaaatgttagccatccagaagaacagtcacagagaaaacttcctagagagtagcaaatatttaccatgagggaaggtagtcttttaggagggcattagtctttcagggggaacagcagttctcaaactttggccaagcatcagaatcacccagatggcttgctgtagattgatgagtctcaccctcagagtttaaggtttggtggatctcagagtccaagaatctgactttctaataagttcccaggaaactacatgctgagaacctctggtgtagaacattaggaaacaggagaaaggtggggttttttcttttgttttgagacaaaatttcactttttgcccaggctcaaatacaatggcgccatctcagttcactgcaacctccacctcctgggttcaagcgattctcctgcctcagcctcccaagtagctgggattacaggcacctaccaccacacccagctaatttttgtatttttagtagagacaaggtttcactgtgttggccaggctggtcttgaacccctgacctcaagtgatctgcctgcctcggcctcccaaagtgctggggttacaggtgtgagccactgtgcccagcccatgagagagttttgaagacgtatcagttctttcagagcaaaccacaccatactgccttacaagggcttctgtcactcaaaaatgaagccctcatccaaagttgaactggccatgtgatattaccagatggctggatcaggccaaggggagaagaatcaagccatttttaagggaagattggaggaagcagccaacaagtgggagaaggtcggtggacagaatgaacaagatgaaaaaaggaaaaggagaactagaccatcgtgttacattgaattctcctgtacagctggaagaaagcctttagcttcccaagcccccagagaaagtagtcctaggtcagctctttgacaacaaggcaaacatgaaggaaacagagaccgcagggtcagtgagctcttcgggctacccacctatcaccagcactcccttcaaagcaggcacagggctggggcaggcccttaggccttgggatttccccatcactgtctttcagccttagccacaccctcttccacaggcctgctgtactgcctccgggtgcggctgtgggcacctgcctggaaggatgtgggaacctccattattcccccatccccgactgcaagccccaccccaggcttgcccacctcaacttacctcagtagcattttctcccaggaggacagctgaagcaagccagcctgaacccatggctttttgttgaaaagccccaggggtgtttgtgggtagtgaccacgtcttagcaccaactggctaagtaactttggcaggtaggctagcctcagatgccacatccataatgtgatgtgaataaaaccctcccctgctgttatcccagggagggagtaaggatcagtgaactgttcaaagaaattgcctcaggataacaggtgtgagttaaatgccagccatgagtgatttcatcttggactttccaagagaagtgaaagagagggagaggggaagggaaaaaaagagaggagaaggagaaagaaataaaataattttttaaaaagctaagtaactccacctataagtggacatcattaccactctctccagcctcaaaaataaggctttggcttgctgtatggcagacacacctgacaggagtcacttaagcataccccgagaatgaccctgcacagcagacgcatctgaatgtgtgtttggagttccaagctaaggaatacaggagtggccaactcaaaaagtcattccttatctttgaagaacatctgagctgtcttgtaacatagaacgtgggcctcacagaggattgaggccctgtgttttgggttaaatgaagattgtcaggtgaaagttgttaggggagggtgctaagtgaaaatgccatataaacagaatgctttctttttaaaaattatttatcttagagatagtcttgctgtgtcacccaggctggagtgtagtgacatgatcatagctaactgtagcctcaaactcctgggctcaagcaatcctcttgcctcagcctttgagtagctgaaactacaggtgtgtgccatcacatctggctaatttttggtttttattttttagatatgaggttttgctatgttgctcagggtgatctcatactcctggccttaatcaatcttcccaccttgacctcctaaaatgctggggttacaggcataagccactgtgcccagcctcaactgcatgctttctgcaggtggcggtggttctcttatccagcccaccaccactggattgctctgtaagttcccctccataaactctatgtcttactcgctgggtccaactctcttcttcagcctcttgcacctggtgctgcccctaatgaagttaataggggtctggcccaaacctttttgctcccaggaaagccttccaaagagtgagggatcctgagggattttagagggacagccaacttgattctgcccaagatgcatctgcacatttttgatctcaagacaatctccctgtctggctaaaagcaactatttttaggatggtgctgaagagttttgggtgtgtcagtccagttgttttcttagaggaccaaccagctcagtggaatggataagccagcagtatggtgtagtttgccccaaaagaactgactctttctcaaaattctctcactctctaatgttctacaccagtggttctcaaagtgtggtttcctgggaacttgtaagaaagtcaaattcttggagtgtactgagacctaccgaatctgaaattctaacaagccatccaggtgattctgatgcttagccaaagtttgagaagcactgttccacctgaaagcctagtgccttcctgaaagaccacctgaaaggcccagtgcttctcaaactttcacatgtacacaaagcacctcagatcttgttaatcttcaagattcaattcagaaagtctaggtgggtcctgggacctgatagctctatcaagctccaggtgttgtgcatgctccagtctcttgacctcgctctcaggagcaaggtccacagcagtgattcgcataagaattcacgtgagacttatctggggagaccttcaaaagtgatctagaattgcattccagcattgccatgttccaaaaagttcccaggtgattctaaggggagtaaaaactgccgcctacacgttcagctttatctcattcagtttacaaagctttgattcctgcttttacagccacccaggagtatatgcattttaagttgttacctgatcattgtaaatgaatatcaatgaagtagctatctagtgatgtaggggtggagagaacgcaggtggttaagaagggtagaaactgttctgaggtggaaggctacaaaggaggggctctgaggatcaaagggaatttttttgttgtagaaggtatcaggaaacatttcaaaagactgaaaggggcaaaaacaatgactggagtctgggatcgcaggctgggttatctgtttttcaaggaaaccacagctctgtaaattgtagagtactgatgatagtaatgcaaactattactattttgttcataaaaatgtgaattgtgtgatgtactcagttagtgtcccacattgaccaatgtacatctgtctccaaattctgtcagcattcctgaaagtctttagatgtgtgggaattttcaattttcctttgaaacagttgtatcattttaactgttccttaatgagttaaactaaatctgtgatatgtttattttatatttatatgcaggtcgtggctttagcactaaaacaaagcccttaacaaagagcatgaagttcattgggtagttgtagcaggctgcataatgatcccccaaaaaagatgtccacggtcataatccctagaacctctgaatatggtactttttttggtaagagctttttggatgtgattaaattaaggatctttaaatggaaagaatattctggatatttggtggtagaggggaatgtaatcacaagagaccatgtaagaaataggaggacaatagtcaggagatatgaggacaaaagcagagggtagagtgatgagcagtggggccacaagccaaggggtacaggaggccttgaggagcttgaaaaaacaaggacacattctccctgagagcctcccagaggaatgctgctcttctaacaccttgtgtttagctcataagaaccatcttggacttctgcctctcagatgttaaggtgataaacttgtatggttctaattggttgcagcagaaatagaaaactataagagtaatcagaaagctgctttccatgccccctgaaggtggtgagtttgcatgggcatgtttgccattgtctttgacacggaacgatgcctcaagcgtgctcctgcctctggctttcaatggctgacagaagctttgacttatctgctctctgactttccctctggcttggtgttccaggttctagactgaaccaataaatgccagcccacctctgatgaccttaaagttaatcacctctttcccctctcagtcacgtttaccaaagtgacactatagtactgaggtttaaactcccagttcttggaggctctctgaaacattcctcagtcttctctcacccctgtaaaactattattcttgtcattttaaaataaggaaatcaaaagaccacagtagaagtgactcaccaaaggtcagcaagtgaacctcgctcatcctcccaaggagttcagcagccttggactccttatttaatgagtgactctccacacaaacttcaatctttgaaggaatgcgctgcaaaatgctgcttagtccctgaacttgaccttctcattctcatgtccaaatccagatatttctcttacttttccaaacactactggggctttagaatccttcacttcttcctcacttgtgaaagcagctgcagaaacacctacatgtttgttttagtttcttagggctactataacaaaacacctagatcaggtaacttataaacaggatacatttattactcacaattctggaaactgggaagtccaagaatgaggcaacagcagagtcagtgtccggtgatctatccctctttctacgtgtcctcacttgacagaaggggaaaacaggtttcctcaagcctcttttataaggtcactaatcccattcacaagtgtggaccctatgacctaatcacctcctaaaagttgcacctcttaatactaccacagtggggattaggtttcaacgtgaattttggaaatacataaacattcaaaacatagtattgctgtatcaaacactgcaacaagagaactgcaaagaaatgcaacccttaacccttgggcgttcacaatttaaaacatggacaagataggtcactgagcctaaaataaacattcaatggtgaatagacaggaaagaatttacccatttaggtcatggataagtgcacaaagggcagggagccaggctaagtgaatagctggggtggagaaggagggaggaggacctcaaagtcccaagtccagataagaagaagtaaggaactaatctccagtggtcagtgctgggtacagttttgtggagggagtggcatttcagggacatcaatgaacaccttctgagggggcagtaagtaagagaagctctattccagacacctcaaattcagtgggtccccaggaggacagcctagagtagagaggtgctggcctgaaaagcttcagagcagagcaagtcagcagatgctatgtgctgctaataggagccctacagacagccctctccaggagaaacacaatcaagttccagctgtatcagctattatggctgtttttcagccaattgcacctagagtgagctggaaaacgtaccaattagctattttgatttgacaacactcaggaaaacaacctgagtgagctccgtgtatctccaatcccaacttgtcgttttcctcatctagataagtagagagatgacagggctgcaggaagcctcatcatcctcaggcctgtaaatccacacattcttaccacgaagacgctaagaggaccatgccaagacctgaacaattcatcagaagaaatccacaggctgtcctcttgcccaccttcaaagaaacagggctagaagggggactatttctgcatatctgaacacaggaaagctaatgaaaatattattgaaacaaatccttttttaatagcagcattaatctggaagcttcattctctctctctctctctctctctctctctctctcacacacacacacacacacacacacacacacacccttgttccctccctcttacttcacaggaaccacaactcatctagtgtctttttctaggcatggtgaactggaatgcagcttcggggttggtgtagttagcctcccgaaagctcccttgtcagagatctctctttgccctatctgcttgcttgctctccctccctccctcccttccttcttgccttccttctttccttccttcctccctgtctctttccttattttctttcctcccctcccttcccttccttccctttctttctttttttgagacagggttttgctctgttgcccagactggagtgcagtggtgtgatcatggcttactgaagtctcgattgacctcctggctcaagtgatcctcctgcctcagcctcccaattagctgggattgcaggcatgtaccaccatgcttgactaattttttacttttttgtagagatggggtcttcctatgttgcctaggctggtctcaaactcctaggttcaagtgatcctcctgccttggcctcctaaagtgctgggattacaggcatgagccactgctcccagccctgctttcttttaaattacatttttttcttatcaaagtaatacatgaatataatttaaaaagtgaaatgataatggataagatgcatcaaatgcttcctatgtgccagacgccgaactaaatgttttacaaggatagtctcagttaattctcagcacaccctatgagttgagtactatctgcgtcatccccactatattgatgttaaaactgactgaggcacacagagcgcatcagtaactttcttaaggtcacgaagttactaagttagtaagtagtggcattagaatttcaactgtagcagtttttcttgggtgtagcagcacacacctgtggttctagctactcgagaggctgagatggaaggatcatttgagcccaggagttctaggttgtagtacactaagatcacatctgcgaatagccactgcactctagcctggaaaaaaagtgcaaacaagtttctaccaaaaaaaaaaaaaaaaagacatggtattatgatattctccttcaagaaagtttataataaaactatggattccaagtgcacacacacatacacacacgcacacacccttcactgtcccactcttcagaggcagctactttcaattttctgaggtgtatctttggtatgtaccactctagtcctaaacaatattcatatactaatatatcttggtttataattttggcataatctatttagttcttcttatggtaaatgagcatgttagctctcatatccttcactataattatcaccacaactttttgttaaattcataatcagtgtttttattattttcgatgatggctcatttctaagttaagcgatgtatactgtctacatttcccatctataagcttttgtttttcctggacttttgttacctaattttgatttgcttaggttattatttttttaatctatggcatgtcttcctatcgctatgtacaatggctttcagtagaactttttacatcttcaaactcatcagataactgtgttttaatatctttttctgaggacattcctcccaaatccctctgttctgctccacttggggctgataggtccttttctgttttgagacagggtctcactctgttgcccaggcttcagtgtagtggaacgaccttggctcaccgcagccttgacctctgggctcaagaggtcctctgattgttctttattcttgttgcacagctgttgtttggggacttccctttgccatcatcctgggatttccctttacctccttcctgtgtgatctccggtttcctaaaatcccggtcttcctctctgttaggttattccctgttttggtcagtacatcatccaagagtttcctgacaaaagagatgcgaaggtaatttgtttctccagaagtagatttttctttcttttttttttttttttaattgatcattcttgggtgtttctcgcagagggggatttggcagggtcacaggacaatagtggagggaaggtcagcagataaacaagtgaacaaaggtctctggttttcctaggcagaggaccctgcggccttccgcagtgtttgtgtccctgggtacttgagattagggagtggtgatgactcttaaggagcatgctgccttcaagcatctgtttaacaaagcacatcttgcaccgcccttaatccattcaaccctgagtggatatagcacatgtttcagagagcacagggttggggataaggtcacagatcaacaggatcccaaggcagaagaatttttcttagtacagaacaaaatgaaaagtctcccatgtctacctctttctacacagacacggcaaccatccgatttctcaatcttttccccacctttcccccctttctattccacaaaaccgccattgtcatcatggcccattctcaatgagctgttgggtacaccgcccagacggggtggtggccaggcagaggggctcctcacttcccagtaggggcggccgggcagaggcgcccctcacctcctggacggggcggctggccgggtggggggctgacccccccacctccctcccggacgaggtggctgccgggcggagacgctcctcacttctcagacggggtggctgctgggcggaggggctcctcacttctcagacggggcggctgccgggcggaggggctcctcacttctcagacggggcggccgggcagagacgctcctcacatcctggatggggcggcagggcagaggtgctccccacatctcagaagatgggcggccgggcagagacgctcctcacttcccagatgggatggcggccgggaagaggcgctcctcacttcctagatgggatggcggctgggcagagacgctcctcactttccagactgggcagccaggcagaggggctcctcacatcccagacgatgggcggccaggcagagacgctcctcacttcccagacggggtggcggccgggcagaggctgcaatctcggcactttgggaggccaaggcaggcgtctgggaggtggaggttgtagcgagccgagatcacgccactgcactccagccttggcaccattgagcactgagtgaatgagactccgtctgcaatcccggcacctcgggaggccgaggctgcggatcactcgcggttaggagctggagaccagcccggccaacacagcgaaaccccgtctccaccaaaaaaatacgaaaaccagtcagacgtggcggcgcgcgccttcaatcgcaggcattccgcaggctgaggcaggagaatcaggcagggaggttgcagtgagccgagatggcagcagtaccgtccagcttcagctgggcatcagagggagaccttggaaagagagggagagggagaccgtggggagagagagagggagagggagagggagaggagtagatttttctaactgcaggatgggggtggaactcaggtgtttaagtagtttttatatagcttttaaccacaccctatcccattttttttccagtatcccccgcccccagtctcctcctatattttacaatacgtgatgttaccaattttgatgcctttctagcatcccacagatgagtttatttaattcagttcttcctctatagattcctagttttttcttgtactgtttagctaagtcattcagcaatcttccgttcactttttgtctccatatcttgtgtttcagggttttatttggcttctagtgtcatgagaaagaaagtgatgctgatttttgtaattcttgttattaagggagcgagttttgagatgaaagtgggctttgccattgttactctgctgctggtaaaccctatgccctttgatcaccgggtgttctacagagttgatatcaggcaaggttgatcctaaaatgacaaatgttctttactcaatttaaatgtcgtacaaagccagctcattattatctctctggtcagttgacatcctgaaggcctaggagttgggattgtcttatcaaatctcaacatgcaggcctgcttttgtctagctgcaagtccactttgaccctagtgggatgctctttttccatccttggatggatgcaaatcaaactttcaagtgcctaacaatcacttagtgcacctattcaagaagaaaccaaggaaggaaggaaggatggaagaggaagaggaagaagaaggagaaggagagaaagaggaagaggaagtagaagcagcagcagcagaagaagcagaaatggatgacagaagaggaagaagaagaggaggaggagaaagaggagaaggaggaagaggaggaggaagaggagaaggagaaagaggaagaggaggaagaagaagaggaggagcaagaggaggaggaagaggaggaagaggaagaagaagaagaagaagaagaagaggaagaaaaagaagaagaagagaaggagaaagaaaaaagaagaagaaaaagaagaaatcaattcccagggcttctgaatcagtagaattcaggcatttacattttttaaagtgcctaagcaagtggtcctcagacttcactttgatcaacacttctgacaattttactcacatgcaaataatggggtgctgcactttctctctgcaaccctgtcagtcctcccttttgctttacttcctatgtgataaaaaaaaaaaaaaaaaaaaaaaaaactaaagttattgcttaatgataacatggtggtttacttgtaaaatagtcacttgtcaggtgtggtagcttatgcctgtaatcccagcactttgggaggctgaggcagaaggatgacttgaggtcaggagtttgagaccagcctggctaacatggtgaaaccccatctctactaaaaatacaaaaattagcttggtgtggtggtacacgcctgtaatcccagctaattgggaggctgaggcacgagaatcacttgaacttcggaggcagaggctgcagcgagctgaggccataccactgcactccagccagggagagagagcaagactctgtctcaaaaaaaaaaaaaaaaaaaatcacttgtcagtcttgttctataaccatgttacaatttgttcttatatacaattattatttttaatctgtggcttgactctattgcccaatatttccaatgaacacttgagaagttctggaaacagtaataaataaacattgattgagcacttaactatatgccaggcattattctcagtgctttaacatgactcacttaatttcacagccctacaaggtaggtactattattattctgattttataggtaaggaaattgatggttagagggttaaacaacttagccagatcacacagctagtaagatgaagagctggaagtgactgagttataaagagctgcaggacgttttggcaatgatcaaggagtggaggaaggcaccagatccaagcagaaatgcctcatcaacttctgcaggcagtcggcttcctgaccaccacacaggtgttccctggcaaaacaggtggccaggactgggggcaacgcaggaagtgctagtagcagtggctgatagaaatgctgaaacaatacacgtagatcaaatctgggacaattatgatggtgtgagacacccattactgaatctgcactgagtgcctctgagctccctttcagtgggagtgtaaggatcccagcagttgaagctacctaaacataaggctatcagtttcaaaagggtggtggaaatggcaacaaaaacaaaagaaatgacaggtcagagtctagtcatgggacagtaataatgcttccagcaaagccaatcttttgagaaataaaatagcctctttccaagcctctctttccccatttgtaaaatgaagataatatagtgtacctaattaacagcttgtaaggattaaataagctgatatgtaaatagtgtaccatagtaccagacactaaataagtgttcaaggaatgttaattattcttaaatctctttgcacattcaagtctaatgtgcataagagccgaaaatataagtaacatttttgaattttatttttgtaatttggtcttcactttaaccaactactggactttttctctctaaaaataaaaacatcttaatttataataaaacaaataaccaaatcaggctcctataaccactgcagcctgtaggaatctcttttggccttccagtagtatacttcatccacattattcactggaaacttacttaacaacgggaggccacatacttgcccttctgaacaaatgcctcttcccaaacactgcctctcccttgccctcatcttgattttgagatccttagggaccttagataatgtttttttttttaatttcttctgaatgtctccagcacaagtaggtaccaaatattgttttgtgatgaataagtagtgtcactctgagaatattcttgttcaatagaaaaaagtaagtgcaagcactagtcattttattaagacctctcctttctagtaacccaagctggacctcggtctctgtccttccctgtgcaccagaaggtcccttgggatcagttagcacaaatttagcagagtcctctcatatcaggctgaatccacaggagactttctcttctggctgccttccgctagtccagacccccacacttgacctctgttgcagtgcaaaaggctcagtacagttgatcctcatggtctaggtcatcttttctctaggctggagggtccctgcccaatctgcttccaatggcacaacttacaccaatccacgagcttgtcctaaaaaccagaagtggctaaaatctaagcttctcacaaactaaccccaaaccacctctaccacctctctcccacttctctcctgcatgaacccaatgcttccgccagaagggcttgtttattgcatccccttctcatatgaacatgagacacttgcatcctggccttcctgaaatgctcttaacaagcacctctcctcctccctctatgttaagactctggacaaaccccactgcctttaattcacagtgatctttcctcctgtaatttgccagttaccattcatatttacgatatgctacctgacttgggcagttgtgtttttatctgcagatctattgtttcctcctaactatactatttgggtgcttgctctatgccactcgctttgtaaatgctttatatggattaattctcacaacaaacctatgaagaaggtcttgtcattagtcccacattaagttgggaagctaggacagagaaaggtaagttggtcgtttgagtgtagtaagtggtggagctggtagatataatgcccatatgttcaaccactttgctgtgccctgcacatggtagccatgcaagaaatatttgttcaactgcttccacactgttggtgggaatgtaaattacttcaacctttgtggaaaacaacatgatgattcctcaaagacctaaaacagaattaccatttgacccagtgatcccattatttggtatatacccaaaggaatataaataattttatcataaagacacatgcacatgtatgttcattgcagcactatccacaatggcaaacacatggaatcaacctaaatgtccatcaatggcagatttgataaagaaaatatggtacatatgcaccatggaatactctgcagccatcaaaaatgaatgagatcatgtcttttgtaggaatatgggtggagctggaggccatcattcttagcaaactaatgcgagaacagaaaaccaaataccacatgttctcacttatgagcgggagctaaatgatgagaacacatgggtacatagaggggaacaacacacattgggacctttcagagggcggagggtaggaggagggaggggattaggaaaaataactgatgggtactaggcttaacacctgggtgatgaaataatctgtacaacaaacccccatggcattagtttacctgtataacaaacctgcacatgtatccctgaactaaaaataaaagttaaattaaaaaaggaaacctttgtttatcaattgttgatttccccacccctcttttgacccagtcttgcctatactaccttctcaaatagagcccagcttgggaagataatcaaacatctttattatgttgacctccttgggaggaaagagttcaataaaaacagttgaaactgtttaattttgattctgtgttttatcactatggtttgtgattctattctgatattctttgttgacagaaccctcagatatacagcctattgcaaagttattatttttgatatcagaagggtttctatttgaaacattgtctatttacattctttagcttaaaatagtccgaagtgtcattattatgtcttcatgtttctaatacaattttatgatgttatatcaatattgacaagtccccacgaagtatttttgccctctctggcttttgggaaagtgtattatgataatgactgagatcatatttataaatgatgccagtatatctttcctcaatatgagaaggaagatagcgtgtgcatggaattaagtgcttggcattgcgcaagaataatctgcccacattacagcaatagttctcacgctttctcctcacaactttctcattacagtgtcatggttcaacccacaacttctgattttatactggcccccagaagaaaaccatgcccctagtcaaggccattcctgtgggactataggacccagaatatgttatactacacaagctccttcattttctcctcgcattattattgagataaatcctagttacagtaaataatatcaaggacaatatgcaggaggaaattcataaaaactcattctgacagtgtgtaaaagggaaggagagtggtttgctgccagtcatggtcatatcacaactctattgcctgctgtgtgttcatgaatttatagtaaagccaaggaaagtatagagggtggtttatttgcgtatttttgaaagcaaacataccagaacttgtacatttatatcaatgtgttcttaaaagcagtcacattatcaacttgagcactaatcccaaaatcttatcattgcttatatatttgttacctctttttcaaaattgccatcaggatagtgtataataatgtatcaagcacattggggcattttgagaaaaacagtgggtgttataataaattacattgagataatcataaaaaacccagactgggtggcaaggatgggtggacactttgctctacagtcatgtaagaaaatcagttttcttccttttttgaccagaaatgttgtgattcagttggtagcttcttttatgagacttgacttgtaattacctttggttatcttcaaaataaaacttttctcaaaaggtgatttctctgctctgatgatagtcaaaagaatgtgcttttggttttaatataattccagaaatattttcatcaaaagcagcatctttgttataacatcagttccaaagggaaagcattctggctgcacctggtctattgtacatgacttatacacacacatacacacacacacacacacacatgtgacacatatcctgggcttgaacacctccaggcttattttgagccagctgtcagggccacctccttgccctccagccaactctcctccctctagtgatggttctaatttcccttatcccagagacagctcttcttttggcatgtagcctagacatcattgcttctaactcctccctggacttttgcagtactttctcgcctttctcttagttatcactatagatcttaaagctttcaaactatgaacttgtgagggagtacatacaagggccaggccttgcaggcagaggccaactcctccatatgcaacctgaacaaagctgggctcccttagggtcagtctcagcaagcgttgtatccaaaataaagacaaatctgactccaaaaagacctcaaagagtaaaggaggaaaataaaattctactgtagatgtattgcccagagagctctcacatgagagcaccaatagaaagatgtatatatatggatatcaactgcaatattgttttagtaactgtgacaggcaaaataatggcttccccaaagaagttcatattcttatccccagaacctgtgaatgtgttatgttacatgacaaagaggagatacagctgctgggggaatgaagcttaccaaatcagctgaccttaaaagaggaagatcatctgagtcagcccaatgtaaccacaattgtccaacttaaaagtgaacaaggaaagcaaaaggggagggtcagagaaaaagatctgatgatggaagtagagtcagggagctgtcatgctgttgcctttgaagatggaggaaggggagcataggacgaggaatgagaacaatctctagaagttggaaaagacaaaataaaaaggattttttcctagcacctccagaaagaaatgtagccctgccaataccttgattttagcctagtgagacctatattggactttggaactacagagctgcaacataataaatgtgtgctgtttaagccactaaggttgtgataatttgttctggcagtaatggaaaacaaatatagtatcttagcccaatagaggaatagataatatgtgtagtatttattgaagacatgcagtatagcaattaagaacgaataagctaagacggaaagtaaaatagaggttaccaggggctagagaaatggagtaatagggagttactttttagtggatacagggtttctgtttaggggaagtgaaagttctcaaagtagatagtggtgatgattacataatgtgaatgcctataatgccgctgaaatgtacacttaaaatgattaaaatgataaactttatgtatcttacaccataataaaaatgagaaaacaaatgtgctagagccctatttcttgctacggataaatattaaaagtataaattatagaatggtaattgagctccacggtgttgttgacactgctggcccatggaccatacttgcagtaaagaggcttgacaaagtgagggttgggtaagtatgggaagggctcataggagcctaaaatttcaatttcatatattttccctgtattccttctcacgcacatcatctgccactcagtgacctgaacaaatacccattgtggcctctcagtctctgattttcatcacttccttgaaacttactttctatacttgcaaattaaatctaaacatagtgttaggctctgtatcaaagggaagcagacgttatcaatagaacatttaccgtaataaactcaggttgtcaggaggttagattttatattctgatgatatttataatgctgcatctaaaaagaaaagaattgaaaaggtgaaaattattgcattcaatagcatatttattagtatttttataacagttaactgccattcatgtagaggtgttattaaaataatctatttgccccatcactgttctttgcactaaagctctaagagaagaatttcttgtttccgatggtcttagtactaagccaaagccaggcccagaggaaatgacttaccaagtgattcaggaaaccccagtaaatggtaactcatttcctcatctcaaccagctgagctgctgtgacctgaagctgttggccatttctgtccaaaggatgaaatttacaggaggacagatttcacctcaccataaggaaaagttctgaaacaatggcttctatattaatgtagatactattattatccccattttagagatgaaaaaaaccaaggcacagagaggtttaagaaactttcccagggccacagagctagtgtcaggaagtatatgtccaaagtccacatgcttactgaccacagtggaatagattgtattttagtttgggttccctcaaagttagaggctgaggtaagggcttgaatgcaacctacttatttgggaggtgaccccaagtaatgaaaaagaggggacagggggaataagacaggaaaaaaagagaagccaggtaagcatgcattatccagagacctctgagaatcttgcaggaagcctcctggaatcaacccccttaggggaggtagactgccacactgcctcaaagcccacagatggacggtttacttgagggctacacttgcatagtaagcagtttgggagaaggtcttaggctgatgtagacatagttggggcacccagcagctgatgtgagacattatcagctcaaagtgagtctggtctcggctgtgactgaaatccaaggtgcgctgaggtgatgtgctggggcactagcaatacctgctacagatggcctctggaagagcagcattcaagggtgaaagacagtagtggagaatgttgccaagaaaactggagcatgtaggctagagaatttcttcacataaaattctataattctctaagtaaaagtacatagggaccatcgcatcttgtcaactaataaatatattgttaatatcataattatcaggaataatgagaaatataatttaaggaaatactgtcaatagcatcctactcttttcatccaagttagacatgagcccaagttagcagtacttaaaaggaagaactgaattcttttgaaatgagtgttaaggtattccagctttgatcagttgcatgggcaaagctgaagactcttcaccagaggttagcatgactaagaaagtgagattggaaatcttctaattacaatttccaggtcaacaatacatattcacacaggaatatgtatatatgttcccttgctaaacaaaagcaatcaggtaataatgggttttttggaaacctgaacctaatattctgtgccatccatcttagagatcttgctgaattcctgagttagtatttgagggatacttggcaaagactcagttttatccactgactcacagttgtggtcaaagttgaagaagggcatgagtctgccgcctacaggctactggccatttctaagtttggaggttctgtttgttcaattcagggcactctgaggaaacatgtgttaggatgtgtggggagtggaggtcagccccccactgaccagggagctggtcagaatttggcacagttggttaaaataaggagctgaggtcaactttggtggtttgacccctccgtggaccttttatcttgtaattctcccaccacagactctaacctctttccaagaagtggtctcctatatgcctccttttgggttcagacagggaacaagagagacactgtggatgagtcaatgaacattcatcatcccttcttggggaaacctcaaaacctttgatctttttcccaaaggcccaaactaatggttggaaaatgcctaaaggcaaatcaatgcctagagagagttttatagtggaataagggcagcgccagtttctctgtattgttttcttttctttttttagagatggggtcttgccctgtcacccactctggagggcagtggtgtgatcatgactcactgtagcctccatctccccggctcaagcaatcccctgctgacctcagcctcctgagtagctgggaccacaggcacatgccaccacacccactaatttttaaaatttttttgtttttttttttttggtagagatgaggtctcactatgttgcccaggctggcctccaactcctgagctcaagaaatcctcctgccttggcctcccaaagtgctcagattacaggcgtgagccaccacatccagcctctttattgtttttacttgcaggtcaagataatcaatattcattttccctttgttttatttttgattactggtgaattttcccttgagtgatttggtgattaaaataaaacgagcagtttcaagtccctgctgctgactgttaacacactcttccctctcaggaaatggaaaagaggaatgtaattatacttcaataggggaacactcatatagaatatagaagaattatagcctctggggcaaccaaatgtgttgaggaccccactctgatatgcagaagtcttgctttccatgggaaggagtccctgagaagaaaaaagataattctagattgtcacatgagtcagcagaaaaggctatgattatgaggacccttaatattgcaaaggacaaaacatacttcatattagctaaaaaacaaaaaaagggaatatctttatgacatcagtgagagattcaaagggtcatgcagcctttgggttcaagtatatccaaggattcaaatgaggtcaacaggattctgttttctttatcccttggttctgcttgcttctgaatggcttcattttcagataggccctctcctcacggaggcaagatggccactggaagttccacgctcaaaatgtctttactgcttgcagtgtcagagaacaaaagagggggagtctttcctgagagctctggaaagtctcaggaagcccttttattgtgctggtatgttagtcagagtcgctggttatgttgtgggtacgatgaatcccaaatccaaggcttaccactccagcttatttctcactcatgtgacatgcccaatgtgtccttggtcattagggacccggaatgatgaacactccaccatttatagttccaccatctggaacttaatattttctttattgctgtagtagaggaagaaaaagactgtagaattaggcatggattttcactgcttcagtccagaagtgatccatagcacttcctcttacattttattggccacatctagcgacacggcaagatgactaggaatgggagggaggatttagaatgttagacgaggactactgtctctgccacagctgacttgggtcatacgttcatctttaggtgaggactgtggccagaggattgaatgctttgattgtaagtcctaagtcatttgctatccccaggactggtgggggaagcacaacttaaccactttagacttaccaatagccccaggactagacctgaggctgataatatttttggagcaaactaagcaatcagatgtttaaagcctcagaaaaagttgttcagccatgtttcccccaaatgaaatttccatctaaggtagagtttggtgaactggtcacagagtgattactgaggacacagagcaagtgtcagctgaaaaggaaaggacattaggatccctggaagctgatttagactacatccctgggaaggctgccaagggaggctgatcatcatcatttatcaatgaccaggaggagacagttcaagggtggtgctgccctaagtccagcatgtgaccaggactactttcagcaatggtcctatacaaactctgcctcatggaagaaggatgaatgtgtatggtatacaaaataatggcccccaaatgtgtctaccatctaatccccaggacctatgaatatgttaggttacatggcaagatgaattaaggttgcagatggaattagggatgctaatctgctgatcttgagatggaaggagtatcctggactagccaggtgaaatcaatgtaatcacaaggttctttataaatggaagagagagaataagagagatggcagcatagggcctcagcctcaccttgctagctttgaaatggaggaaggggccatgagctatggaatgtaggtggtctctagaagctagaaaagacaagaaactagattcttccttagagtctccagaaggaatgcaactctgccgaagccttgattttagctgagtcttttgtgaggcttctgatctccagaaatataagataataaatctatgttttattagccactaaagctaataaagccactaaagttattttaattttcactacagcaataggaaattaacacactgtggctcaggcttctagcacccttgccccaggaagcacaggcacagaggtgtttagatatgactgagcccttcaggatgaggactgggctggagagacctcccagagataaaaggggacactggccagacaaggcaggcagatgccatggttcctgtgatgggggagtagacaaaacatgaagaaggtgccagagaacaaggccttcttgatcccttgtgtccttcctggagtcaaggcagcccagagtttgtgtatcatttgattgcccttctcgcctgaaacatagatgttgaattagaacatactaaaaccaaagcaaaacacagacaaataactggatattttttcaccaggccaagttgggtggggcactgtaagaactcaaactttacaggccgagaagtcagggccaaacccacagacctagtaaattagcccaagttgagaggcatgcacacagcctggacttcagaatggagatttttctaacaatcttcacaggagttgactcacggtatgctccatatcatggtcgtatagaaggagacagttaggagaacagtactcctttaaggataatttatgagcttgcataaatacccatatacacacggacagagaaagccaaaactttctaatgtcttcaattaccttgtctgccaagaagaagggaacactagcaggaaaggcttgcctccttagaatcaaatggattccccactcccatctttggtgtaatgctacacatgtgcaggtagcataccaatagggtcagaagaatgaggcttcgatcattggtaatgggacccacaacttgccattgctctcagaagcatagcaagtgaatgctgtgatcctttcatagaaacttgtagccctcatactgtgagctaatggtcccagtcttgttcttaggtgaccatatgttcacattaagcttgaactttagtgctcccatatctattagttatcagcatccaagtcactcagagcagacaaaccactccaacatttggattgaattaacacccttactggcaaaccacttacagagggaatcaatctcccttcagaggccaaagtattctcagtgccccttctaggaacagctctgctttcagacagctgaggctgagaactgctgagatgcttggccaccctgtcaagcatccactgtcggtagtttgtgggcatgagaaggcttcatgactccagggctttggttactagactttgccaagtgctcacttgtcaagctaaggcatgaggtaaaggaaacccacatctattgagcatcgatttgccaggtgcacatctattatcgaattcaatcaccacagcaacactatgaagttgacactgttattcttaattcagaacctgggaacttgaaaagctccagcctaatatggttaacttgcccaagttgcacagctagcaagcaggagagctcacgccttttcaggatccccttgggcgtcctaattggtcacatactaaagtctcattttataaattcccatccctctt

SEQ ID NO: 495 - DNA, 76354 bp, Homo sapiens
attgggtttgtgttcttattgttgagttttatggttctttgtattctttgaataatagtcctttatcagatatgtatttttcaaatattttctcccattctgtgacttatcttctcattctcttgatattgtcttttgcagagaagaagctttttatttttttttctttttgacggagtctccctctgtcgcccaggctggagtgcagtggcgccatctcggctcactgctgcaagctccgcctcccaggttcacgccattctcctgcctcagcctccctagtagctgggacgacaggcgcccgccatcacgcctggctaattttttgtatttttagtagagacggggtttcaccgtgttagccaggatagtctcgatctcctgacctcgtgatccacccttctcggcctcccaaagtactgggaatacaggcgtgagccaccgcgcccggccaaaagcttttaattttaatggagtcttgcttatgaattatttctttcatggattctgccattgctgctgtacctaaaaagtcatctttatattcaaactcatctcccatcttgtctagttttatagttttgtgttttatacgttggcatactgtccattttgagttgattttcatgaagagtataaggcctgtgtcttttttttttttctttgcctgtggatgtccagttttttcagtaccatttgttgaaaagactatctctactttgttatattgcctctatttctttgtcaaagattaggtaactatatttatgtgagtctattcctgatcttttttccattgatctatttgtctgctttttgccaataccacactgtcttgattattgcagctttatagtaagtattaaagttggatagtgtcactcctccaacttcgttcttatcctttagtattgtgttagctattctgtgtcttttacctgtctgtataaatgttagagcaagtttgttaatatccacaaaataacttgctgggattttgattgggattgcattgaatctatagatcaagttgggaagaaagagaattttgacaatattgagtcttctgttctatgaacatgtaatctccattagttcctctttgattttattcatcagttttgtatttgttatagatcttgcacatattttgttatatttatacccaagccttttattttggggggctgctaatgtaaatggtattgtgtttttaatttcaaattccactgttcctggccggtgtataaaaacatgattgacttttgtgtattaatcttgtatcctgcaaccttgctataatagctttttagttcctggaatttttcggtggtggttattgttgtagttgtttattcttttggattttctagagactattatgtcatctgtgaatcttttatttcttctttctcaatctgtgtacatttatttcctttcctcatctcattgcattagcaaggacttcctcaccttttttctaattttagcaggcaaatttctggtttctcacaatgttagctgtggggttatttgtagattttttaaaatcatattgaggaagtttccatctatatctagtttgctgaaagtttttattatgaatgggtattggattttgacaaatgtttttttctgtatccactgatgtccacatgaattttcttcttaagcctgttaatgtgataaattacaattttcgaatgttgaatcagccttgtatatctgggataaatcccacttggtaatggtatatagttatttttataaattgcaatgtaatttactaacattttgttgaggatatttgcatctatgttcactagagatattggtctgtatttttttttgtaatatcttcgtttggttttaatattaacataatactggcctcgtagaatgagttaggaagtgttccctttgcttgtcctctgaaagagatcatagaaaattgatataatttctttttttaaatctttgatagaattcaccagtgaacctcttcggatttgttactttctgttttggaggttagtattacttattattgacttaatttctttaatagatataagtctattcagactgtttcttcttgcctaagttttggtagattatgtctttcaaagaactggtccatttcatttaggttatcaaatttgtgggcataaagttataatagcattctttattattattccttattatccttacagtgtctctgggatcagtagtgatattctctctttcctttctgatattagtaatttgtgttccctcttttttttttaattagtctggcaaacggctccttaattttattgatcttttcaaataaccagttttttgtttcattggttttctttattgattttctggtttccattttattgatttctgctgtaatttttattatttcttttattcttaccttgaacttaacttcctcttttgttctagtttcttaaaatggaagctgagattattgatttagatgttttgtttataatacatgcattcaatgttataaatttctctgtaagcactacttttgctggatcccacaagttttggtaagtgtgttttcatttttatttagttcaaaatatttttaaatttaagatttctcttttgacccatgtgttacttagaagtgtgttatttaattttcatgtatttcaagattttgtagttatctctctgttattggtgcctagtttaatttcattgtggtctgaaggcagacatcgtatgatttctattcttttagatttttaaggtgtgatttacagcccagaatgtgatctatcttagtgaatgtttcctgagagcctgagaagaatatgtactctgcttttgttggataaactagtttatagatatcaatgatatccagttgattaatagtgtcactgagttaaactatatccttactgatttcctatctgttggatctacctatttctgatctaaggttgttgaagtctccaactatgatagtggattcaactatttcttcttgcacttctatcagattttgctccaggtagtttgatgctctgttgtcaggcacatacatttgaagaattgttatgtcttcttggagaattaacccttggagaatataataattttatcattatataatgcccttccttatctctgataatttcttttatgttatattgtctccatctgaaattaacatagatactcctgctttcttttgattaatgttagcatattatatctttctccatccatttacttttcatctagatgtgtcttaatatttaatatgggcttcctgtagacagcatgatttggggtctagttttttgatcccctctgacaatctctgtcttttaagtggtatgcttagaccactgatgttcaaactaattaatataattggattaatatctaccatatttattactattttctatttgtagcccttgttgtttctttttttaatcttccattattttgctgctttttgtggttttaattgtgcattttatatgattatgttctcttttatttagcatatcagttatacttcttttattttactttttttagtaagtgccttagagtttgcagtgtacatttacaattcatccaagtctactttcaaatgacagtatatataccactttacagtggtaaatgtgagttccttatactaaccaaacaatcctaattcctccctgttgtccgttgcatcattgctgtcattcatttcacttatatttaagcacacataagcaaatacatatttgaataaattgctattactattttgaacaagctgttatctgttagatcattaagaataagaaaaatcaaagttttcattttatcttgacttattccatctttaatgttctttctttttttttttttttttttgtgagacggagtctcgctctgtcacccaggctggagtgcagtggcgtgatctcagctcactgcaacctccacctccccagttcaagcgattctcctgcctcagtctcccaagtagctgggactacaggtgcgtgccaccacgcctggctaattttttgtatttttagttgagacggggtttcaccacgttagccaggatggtcttgatctgacctcatggtctgcccgcctcagcctcccaaagtgctggttctgtctttatttatgtagatctgagtttctcacctgtatggtttaacttctctataaaatattttttacttataatgttattttgtattttgcttattataagttttatattgttgcctaaatagattttatttgcataaatttacagggtacatgtgcacatttgttacatgaatatattgtgtagtggtgaaagaaaatagacatttcttgcaaagcaggtttactgacaacaaattcctttaatttttgcttgtctaagaaagtattctccttcacttttgaaggagaatcttacagggtacaaaattctaggttggtgggttttttcctctaaactctttgaatattatactccactctcttcttgcttggatggtttctgaggacaagtcagctgtaattcttattttcttttctctataggcaaggtattttttcccctctggcttccttcaggatttttttcttcatctttgatttttctatagtttgaaaatgatatgcctaagtgtgtttttttggcatttatcctgcttcttattctatgctcttcctgaagctgcggtttggtgtttgacactaatttggggaaattctcagtcatttttgtatccaatatttcttccatttatttccctttcttctccttctgatattctcattacatatatgttacaccttttgtagttgtcccacagtccctggatattctgtttttgtttcttgcaatctttgttctctttgcttttcacttttggtggtttccagtgatatgtcctcaaactcagagatcctctcctcagccagtccagtctactagtaagcccatcaaagggattcttcattcctcttacagtgtttttgatctctaacatttatttttggtcttatcttgggatttccatttctccgctcacattgtccatctgttcttgcatgttatctactttatccattacagcccttagtgtatcaattacaattgtttgaaatgtctggcctgatgattccaaaatcccttccaggtctggttctgaggcttccttggtctcttcaaattgttggggtgggggggttctaccttttaatatgcattgtaattttttcttgatagtcagacatgatgtactgggtaaaaggaactgctgtaaataagctttattaatgtgttgggacagggaaagtgttctatagtcttatgattaagtttcagtctttcactcgacctgtgtctcaactgtgaacttctcaagtttttctgtttgtttgtttttttctctccccttttaggtgggagagaatggatggagtgcactggaattgggtattttccttctttcacatggaaggttagagttgaccagagttgggtatgtcccttcccccaagtcagttagactctgacaataccccagcaggtgaggctatagttaactagtttctcccgagggtaatccttgttaagaacagattgctctggcgtagttttaaatggttccttttgctcacctcctgctgaaagcatgaagagattcttctctgatattttctgtgagaatctgatcaagctcctagaggtgaaactcacaaatatttggtagtcgctctagactgggttgctccggagtttttaactctcaggcttgttcgccctgattctccagcaatttgtaaattagagctcaggttttcctgccccagcaccggtccccacagtggtttccacaggtgagtctctgctctggaagacggtaactccctgcacttgcctgtctgtctctccaatcgtgggaataacgtccttacctctctttcagatcatagaagagttgttaatgtttcagtatgctcagcttttaacatgctgttagggcagactggcaacttccaagcttcttatcttacatgcaaaactgaaaaccctaacttgctttttctggtttgataggtttgtgattttagtactttaaaaatgtcggtgcactgtattccggcttacgtggtttctgatgagaattcagtcgttcttatcttggttgttctgtacataatgtcttttttctctgcctgcttttatgatttttctctatcactgtgttttagtaattgcatatcatgttcttagtgtcattatttttatgtttattctacttaaggttttgggggcttttttatatctgtaggtttatagttttcatcaaatttgtaacatttctgacaattttttgtttaaatattttgacatcctcccctctgtggccctgctcctccaagacgccaaatatacatatgttagaatgctttatatctttccaaaagtcactaagtgtctattaattttctcaaatgttttttctctctgtgattgagtttggatggtttctcttgctgtgttttcaagtccactgatttttatttttaggagaaggacaagtttaattagttccttccagtgaatgttttaagatgaagttttacatatatatatatgtatatgtgtgtgtgtatatatatgtatatatatatgtatacacacacatatacatatatatatacacacacacacacgtatatatatacacacacacacatatagaagttccatttgggccttttaaaaaagttcttgtctgctaattccatcaattctgtcatttcttggtctgattttattgtgtttatttgttttggggcttttgtgttgttatgggtcatactttcttggttcattgcatgcctcttaagttttggttagatgttagacattttagatttttacatttttgagtttggaattttgttttctttctgtaaagagtgctggactttgctgtggcatgttgttaaaactttttgcccatctgttctatatgtttatgttctttataagcaaattttggatcaggtatggagtggcttttactctagggctaattaagtcattgtactaagacaggactcctctgagaacgttaacaaataacccttgccttatgaggtctctactttctggctggtgataaagcaattttttctcaatgtgaatgaactctgggaagcatttggcttactcttttctagtggttctttccttggcctcatggagtttgaacaccacccaggtgttggcgggaactcaatgagagactctagcagaatgctctgcagatctctggagatgctcatgtgtgcagttcttcttcttgatactcggactcacaaattctagtcacctcagccttctggaacactgagttctgcctcctccactcactataactggctggttctgttggggtttcccctctctgcagtgaagtcacatacacttacaacagttagcttctatcctattggccagaatttaataatgtgaaaacacctaggtatataaaatactgagaaatgtttttattttgggtgggcccagctcagctaaaactcaggaggtctaattttgagaaacaagggaaaaacaaatacttacagattaacagcaatcttttacataaaaattttccacccccaagtgaaaataagtagcagtttcactttttcaaaggctttagactattttgtttcctagaaatatatttattttcattaatagattattgggtctgacctccaactcagataaaaccattggattccattttttattatccctatgagttctatcctaagaatatgaaataattcaagattccattaagtcaggcacaaattaccctttaattatattagtagtctatcatcaaaagtctttagagtgggccgggcgcggtggctcacgcctgtaatcccagcactttgggaggccgaggcgggcagatcacgaggtcaggagatcgagaccatcccggctaaaacggtgaaaccccgtctctactaaaaatacaaaaaattagccgggcgtagtggcgggcgcctgtagtcccagctacttgggaggctgaggcaggagaatggcgtgaacccgggaggcggagcttgcagtgagccgagatcccaccactgcactccagcctgggcgacagagcgagactccgtctcaaaaaaaaaaaaaaaaaaagtctttagagtgaaaaggaaaatacatgaatgtataataaaagccaagaaaatgtaaaactattcattctgggtaggagttgcaggcttctctgagttcagagatatttatgtaagatgtgcttagaagaacaatgtctttttaagctttgcatcccatgacatattaacagtaaaatttaaaagggactcagtaatcagcaaaatgacttatatgagaatgttcacaacttgtttcatactaaccgaaacctggaaatggtccaggatggatccataggtgaatggattagttgtaatatatgcatacaagggtatatgcatactcatcaataaaaagaaacaaactattgatacatgcaacaacatggatatgtctcaaaagcattatgctggatgaaacatgttttatacaaaacagtacatgctggctttactaatatcagtggctgattccactaatatcaagctctggaaatagcaaaattaatctatggtggaaaaaaggtaaaacagtctctgcgggtgggggaaggaattgacttggaagagacatgaggaaactctaaggggagatggtaatgttttatatcttaatcatagttttggttatacaggtgtgaccattggtcagaactcagtgactgtacgtttcaaacttatgcatttgattattttatatcaaaagaagaaaatgtatattgatattgaactctagttaatattatgtctgctgaaatacttagaaggaagtacatttatgtctacaatttcctttaaaatgcatgaaaataatgagttgattggaggacagagggatggatggatgcctgcatagtaaaatgttaatagtagagtcttggtggtgtgtatatgagtgttcactgtacaagtcttttaatattgcagttaaaaattttttaaataaatattgagaggaaaaagcgagtgtgagggtagctttgaggcaaatgtctggatagaatttttagccagaataacttcagtaaactaggatggtattcgtcttctttaaagtgtatgactctcttagcctggagggaaaaaaggtatagaaaggtttacacagtcaaaaccacagtttaatatttacagattgagaaggattctgtgtatatttagtatttcatattgatgtaatgtttaagagaatgtgacctaatagaatgacaatctcataactccaatttgaaacatgtaaataagtaactgagatagacttctgtttttttttaacttctattttaggttcaggggtacatgtgaaggtttgttacataggtaaattcatgtcacgggggtttgttgtacagattatttcatcaccatactgggcttaggtattaagcccagttcctaatagttatcttttatgctcctcccgctcctcccaccctccaccctcaagtagatcccagtgtctgttgttaccttctttgtgtccatgagttctcatcatttagttcccacttacaagtcagaacgtgcagtatttggttttttgcgcctgcattagtttgctaaggataatggcctccagctccatccatgttcctgcaaaagacatgatctcattttttttatggctgcatcgtattccatggtatgtatgtaccacattttctttatccaatctgtcattgatgggcatttaggttgactccatgactttgctattgtgaacattgctgaaatgaatgttcatgtgcaagtgtctttatagtagaataattcatattccttggggtatatagccagttatgagattgctggttcaaatggtaattctgcttttagctctttgaggaatcggcatactgctttccacaatggttgaagtaattcacactcccaataacagtgcattagtgttccttttctccacaacctcgctagcatcagttattttttggctttttagtaatagccattctgactggtgtgagatggtatctcattatgattttgatttgcatttctctaatgatgagtgatattgagcttttttcatacgcttgttgcctgcatgtatgtcttctattgaaaagtgtcttttcatgtcctttgcccactttttaatggggttctttgtttttttctcatacatttgtataagtttcttatagatgttgggtattagacctttgtcagatgtatagcttgcaaatattttatcccattctagttctttgaagaaagttattggtagtttgatagcaatagcactgaatctgtacattgctttgagcagtatggacattttaatgatattgattcttcctatctatgagcatcggatgcttttccatttgtgtcttctctgatttctttgagcagtgttttgtaactctcattgtagacttctgattttaaactaaaatcttactaagtttagtttagtattggaaattttacaatatataagacttaaatgctcagaaagattttgttgttgttgagaaaattgaaatacatgtcctataaaactaaattaaacgtgtcaaatttataaacaaaattttaaacgtttgaaggtttaaacattttagcaaaatctgtaaatatgaccaaactgaatttaaaaaccccttaaaaataactgataaaatttactagacttaaaaatagagtaagatttgtaagctaaattgaaagcctatgaattgcatttttttaaaactgccttcaagtttttcaaaaagctcatatcaatagaaagaagcttcactaccaaaatatttttcagggaatattttggatcacagaggtaggctgaaatagcgagctttccaacagattttttaacgttcatagaaaatatcaacccaatcatcagctaggctattttctaaagtatatagaactacatgtaataagcaaaatattccaggactcttttgaggagtttaacaatatagctaacttcaaaatcactgctactcaatgttagcaaaagttcagggagagaagcactatttaccaaatgttgcctaaagtatatgcaattcatccatttctccaagtaacctaaaccttctacagaattaagccagaccatcagaaagctggtctccattctccttgtccttcccatttaacaccacagaacttcttttttttggcggggggggggtgggaatagccttgtttattcttttttttttattatactttaagttctagggtacatgtgcacaacgtgcaggtttgttacatatgtatacatgtgccatgttggtgtgctgcacccattaactcatcatttacattaggtatatctcctaatgctatccctctcccttcccccaaccccacgacaggccccggtgtgtgatgttccccttcctgtgtccaagtgttctcattgttcagttcccacctatgagtgagaacatgtggtgtttggttttttgtccttgtgatagtttgctgagaatgatggtttccagcttcatccatgtccctacaaaggacatgaactcatccttttttaggctgcatagtattccatggagtatatgtgccacgttttcttaatccagtctatcattgatggacatttgggttggttccaagtctttgctattgtgaatactgcagcaataaacctatgtgtgcatgtgtctttatagcagcatgatttaaatcctttgggtatacacccagtaatgggatggctgggtcaaatggtatttctacttctagatccttgaggaatcgccacactgtcttccacaatggttgaacgagtttaccatcccaccaacagtgtaaaagtgttcctatttgtccacatcctctccagcacctgttgtttcctgactttttaattatctccattctaactgaacaccatagaacttctttgaatagacttttttttcaagactgtggcatcaacctgcatgcattgcgttgtgggaaacaaatctatgaaatttgatgttggacacactcttgattaactgaggactccattcactgcatcacacagggtcttcttgccagagacccacaggaggaaatttgctggggacatagtaccagggaaagttgtgtcttgaccttaattattttatgaatcagataaataatcattacatcatctttctctgtattggctgctagaaacctcagagacacatccatggacttctacaaactatggtgattctcatggcccacatattatagattgagctctcctttgacttggcttgacttgactttttcaacttatttttatttcactaaatcatgtttacttatttttatcttgtgttattttgtattaataggtatacataagtatatatgctgtaagtctgtaaatcactcttagaatgattaatggaacacagtaactcctaactgtattgttcatcagcaaaagcgaaatttcaaaaccaaagggaagcaatgcagacagagatgagacagaggaccctacatgacagctgaaagtaggttaaaaaaaaacctataaaaaagatacactgtttttaattgtcttctgaaaaaagtttggaaggtgggaggttgagggagcagggaatatgtgaaaattcgataaactcctttcacacaataacaacttattattttgtgcacgtttcatgtttcaaaatatctacagaaatgccaatttatattttctggagtttgaggtacagacaacctttagttattataaatcctatctcttgctaaatttaaattaattccacatttgctcagggaggtcaagaccaagtcacagtgctgagtcctcagtatataatccttggtttcagtcctcacctcttttgtgcaggaaaaatctgtggtagttcttgctctttcagtgttcagaagtgtttcaatatgttctaaagcacactcattgctatgagaaaaaaatttcatcatacattatttctagtggacagtcaaggctttgtgtcctcagtagaccacatatgttgcacgctgtttgctaaacagactttcctctggaaaatcacagccatccccatcagtccatatgcttccagatggagatgagtcctctcccagccccagtgatgggatatccctggcctttaagccaattagcaaacctgatacccctagccatagtgattggttcatattacacagccagtaatacatattggcaagtctgctgggaaagatagaaagcaagtattctctctcttcagctagatttaatgatgtgagaatttaacatttgtagctgctttaaccatctggagaaagcctggatctactgggagcaccacatatagcctggcttacagctaacccaaaagagaaagagggccttgggagagaacaaagtgacatacttaaaccctgaagcagatcgtgcctgaggctacctttgcccataaacaattccaggtaattgagtcaatacatttatttttgcttaaaccaattttgaatgggtatttctgccaatagtgtaccacctaaagatatccagagttaaatttaattttgccttcttgcctaccattggcaaatagaaaaaaaagtttattttctttttctctgtatctcttctatcaatgtacatataccatacttgtgtgcattacttccttcattcttatatctcctaccctttcaaaacggtgagctggaagtatgcaattttttttctctcaagtaattctttcttgacagtgagattcaggcagttatttgaaggctgctaagaacaggtgaggacttatgcataagcctgctggctgaaaataaaataaagcatgctgaagtccttctcacatttctttctttctttcttttttttttttttgagacagagtctcactacatcacccaggctggagtgcagtggcatgatcatggctcactgtggcctcaaccttcccggctcaaacgatctcacatttcttaaattgctcttaccaaggctttaaaagtccaccatatgggagaccatgatccattctgcagcaagtctagacccctacagttcagagttagcaaagtgtggtccaaggttccttggcatcagcatcgcctggggtgcctgggacaaagcagttcactggctttctcccggcctagaaaccctaatctgtaggagcctggcctgctaatctcagttctaataaattccccaagtgattcacatgcacggtaatgttagagaattctaacattaccttgcagcgatgcttgcagtattgctgcagtagcttcatcctgtcaacagcggcgacatgaaaattacttccgtaatagttttctatcactgtgaaaaatccatccccctcatttatgggtaatgtagctgcttttaaatgtaaaattacagtaatgggagaattttaactggttggaattgaatgaaatgcaaggaacactgaaggaatttcaaaaacactttgcactgaatcatttattttgaatgtctttctttatctaaatcaattgttcttaacctcggctttatgtcagcttcttcgaatactgctgtctaggccacatgccagaatgatgaattcagaatctctaaagatgagagttagtcattagtgttggaactatggctagtcaaagcccatagagaagactattttcatgattctagaggcgaaattcattattatgaagacaccagacctgagaataaccccaaagaatataaaactccattgaatgggagatcctggtctatctccactactgtaattcctactatcgtctccagaatatctcttcacttctgtataccttttcaaatccaatttttctgagattattatggcagatttcagagctaattaagatatcaatttcccaagaccataatcacatcagaaacaggtttacatttttaaagatttaccatgccctcatccggttacattcatatcacagaaatatacagttgacccttgggactaggattgggagcacccatctcccactaagtcaaaaattcacatgtatcttttgactcccccaaaacttaactactaatagcctactgttgaatggaagccttaccaatagcacagtcaattaacacatatttcgtatgttatatatattttatactatattcttaaagtaaattagagaaaagaaaatgttattaagaaaacatatttactattcaggggtaaggtgtggtggctcatgcctgtaatctcaactttgggaggccaaagcaggtggatcacttgaggtcaggagttcaagaccactctgcacaacatgatgacaccgcctctctactaaaaaaattagctgggcatggtggtggacacctgtaatcccggctactcaagaggctgaggcaggaaaatcacttgaacctgggaagtggaggttgcagtgagctgagattgagctgctgcactccagcctgggtgacagagagagattctctctctctctctctctctatctatctataacccattcattaagtggaagtggatcatcacaggttttcacccttattatcttcacattgagtaggctgaggaggaggagggagaggaagagttgatcttgctctctcagagatggcagaagtggaagaaaatctacgtataactggacccacacaattcaactcgttttgttcaaggtcatctgtacgtacaggcagtccctgacttagatggtttgatatacaattctccaactttacagtggtacgaaagcaacacacattaagtagcaaccttacttcaagtacccacacaaccattctttttttcactttcagtacagtattcaataaattacattatgtattcaatattttattataagaggctttttgttaaattattttgcccaactgtacattaatataagtgttctgagcacatttaacataggctaggctaagctataatgttcagtaagttaggtgtattaaatccattcctggcatgatattttcatcttatggtgggtttattgggatgtaatcccattgtaagtcaacagcatttatattttttaattcactatacccactttagcaaacaaaaaccagaggaaatgagccagtttttcacatagccatttcaagaggctgaggatgttagatggataagatctctgtcaaagacctaatggctttaatgagctcagcaatgtaaaagtatgtgggcaaaaattgctcagaatgcactagttcctttttcctgatgtcagaataccacagccttatagcagagctgtggcttgattaatcgattcagaatgattcctgttgagcaactgtctttttgaagggaatgccagtgcaatctgctaacaactgtcactttatattaagtatgaattatgctgtataatgggttcaggtgctcatataaattgactgtcataaaatccttatgtgtgatgtttcagtaaaattatccattcagatgatgaaaacaaaggagtggaataggacaagactataaaggtgttatccttcccactgttcatgagaaaaacacggtccaaaattactactgctttattgttcacccagctcggtaattagcagccccctccccctaaaatttttgggcacagagatgatgttatgagaaaagacaagatagaaaactctcacacactgttggtgtggattgattacaaccaatcattgtgtatcaaaatatgtattaaggtgtagtactgcatagcctttgacccagtaattttcacttccaggtatttagccctaggagataataccacaagttcaaaaaagtttatgcataagagcctttattatagcattgtttagatcagtaaaaattgagaaacaacaaatgtttatagcaaagtgttgtgtatagcaggggtccccaaccctgggggccacagaccaataccagttaggaatgggctcacacagcaggaggtgggtggcaagcgagcattatggcctgagctccgcttcctgtcagatcagtggtggcattagattctcataagagtgacaaccctattgtgaactatgcatgcgaggaatctaggttgcacgctccttatgagaatctaatgcctgatgatctgaagtggaacagtctcatcccaaaaccatcctctgcccccttctggtctgtggaaaaattgtcttccatgaaacctgtccctggtgccaaaaaggttggggacggtggtagaacatgtatgtgatggtattatgaaaacactaaaaatgattaataactatggtaaatgtattcacacggaaagatgctcaatacatttaattgactacaaataaagtttatagaacagtatatatggtaatgctcatttgtgtaaaattttatacatgtatctacatgtgaatataaaataatatccaaaagaatggccgttaaaattttaatggtagaatctagagtgatttctacttttttcattacttttctctgttgcttgaatttctataatgaacactcagcaattctgcaaaaacaataaagctatttaaaaagaaatgaatatgataagaaactttatatgattacaaatgaggcggaggaatttgaaaaggttctaacgattacacctccattcagagatgatgataatgacaatgatggatgaattgtataataatcttatatgatagcaaaaacattaatttacaattattaggagtagcattaggcacttagcactgtagtaacaatagtaataaatggacttggaactgaaattaaataaacaagcatgaaagcatttgcaagcatatcgcatggggagattgaggccattctgttggggaaatacgacatgacatctgagaattgcaatgtcagagtaacaagcagggtttaacacaattcaggagagtttgtcttggcgtaggaagagcttttgagaggaaatgaatgtgagaggtgaatttagaagtgtgaggtagacagcttgttggagaggaagtcaaatagaatatttcatagagcccaaagtaaggaagatgaacatttttgcctcgggatttccaaagaataaatgtgaaatgtgtctccattctgtggtcatggccaaagtctgcagcctagctctgtcagccagtcatactttccttcaaacgctttggcaggtacattgtatagaaactactggagagagatccctcatcaccagaaataccacgtaagtgaaaccttcgggaagcctctgctatctctttcagaccacaaagctattactgaaggcacagctaaagcacttaaaggaatgttttgttattaccatataacagtcttacaagtaggccgaatctctttctgtttaaatgttattttgaaggcatcaaccatttcattccttccccagcagtcctttgctagagcctgaaatccctttaaatatccgtttttggggggtatgatattattgcatctctaaacgagggtcaacaaaacagctctttatcagccagtaatgactcagcatggtttctttgattagagaatcagaataactcccttatccatagttttgccttctgcagtttcagttacccatgggcatctgcagtcagaaaatattaaatggaaaattccagaaataaacaattcataagttttaaattgcttgctgttctgagtagcatgatgagatctcactctggaccactgggacgtgaatccccccttggtctagtgggtccaccctgtatacgctacccacccacaagtcatttagtagccatctaggtcagtggttcccaacctttttagcaccatggtccgatttcgtggaagacaatttttccacacaataggcttcaagctcctaggagaatctaatgccgccactgatctgacaggaggtggagctcaggcagtaatgctcacttgcccgccactcacctcctgctgtgcagcctggttcctaacagaccagactggtaccggtctgtgacccagggggttgggggccccggtctaggtgatctgatctaaaagatagtgtatatagggttcgatactatctgcggttttcggcatctcctggagatcttggaacatatttccgtggataatggagtctgctaaaccaaggaaatgggatacaattaagatattttggtggagctggaggccagtcctgtacggggaactagagtgggaggcaagtacagccaagagtattttttatgaaatacaatcttttaatatataaaatctattttaatttaatatgtatataatcttgttcaaatgtcaaaaatagacaaatgagtttagcaactcagacctaagcacaacactcatcacagggtgttgctgtttatttcttatattattatagttgtgattatttattctctgccttcccctccaatgaataagctccacgcaggttggattccattcatcgtgctcacctctgcacctgctgcagagtgcacctgccacaaagtaggtgctcagtggaattcaatgagtgacagtagaatgaatggcagcctgggcaaaaaagagagcaaatattcaagaagtgggaggagttgggagaaagaagttggtggaaagaggggccccaaggtagaataacctacttttgggtttcacctacctggtataaacatatgtatatattatcctgattttgtaaagaaacagtttctttctttcctctatttttcctaccattcaacttttataagacaattgaattttctctacaaaaagcaaataaattacatttacagagtagaattcaaaaggtaaaggtcaaagaaaatatgaggctatttaataatggtggttcttagcttttcttttagatgtgtatcagcatatataagtttttaaaatattcctcttcttttcttatttttttacctcaaaattttgttatagtaagtattttaacagtttatttcctatgtgtcaatattataggtatcagtttttggggattttttgtttgtttgttttgagatggagtctctctctgtcacccaggctggcgtgcaatggcagaatcttggctcactgcagcttctgcctcctggattcaagtgattctcctgcctcagcctcctgagtaggcaggattacaggcgcccaccaccacacccggctaatttttgtatttttagtagagacagcgtttcaccacattggtcaggctggtctcaaactcctgacctcgtgatccgcctgccttggcctcccaaagtgctgggattacaggcatgagccaccacacctggcctctatcagttttttctatacttcaaatactgtttttctatagcacatctttattccctgctataatacctgtcaaatgacttgtggggaggggggaggtatgagaaggaagcgacaacagttatccctgtcattaatcaccccttcccaaaatacagacattcatttaattaacaaatacttattaaatgcctactactatatgctctggcacctggggacacagctggggacaaacaaagtccctgagagctaacatcccaatccacttgcagctagttttctcaggattgagatttatttcttatataaaagcttgctgaaatattgacaattatttacggatagtacaattgggttttatttacatttcacattgcagagattaaaacaataaaacaaaaccctgtcatcagcatcacaggcagcagttgttagtcatcatgcactggatgggagatacttttttttcttttttttttttttttttgagacagggtctcactctgtcacccaggctggagtacagtggcatgatcacagctcactgcaatctcggcctcctgggctcaagtgatctcccctcctcagcctcctaagtagctgggacacaggttgtgccaccacacccagctaattttttttctttttctttctttgtagagatggggggtctcactatgttgctgcagctggtctcaaactcctggcttcaagtgaacctcacacttcagcctcccaaagtcctgggattacaggtgtgagccacctcacccggccaagatatgctttctaacctaaagatgagtaagagcagagtttgtagtgaatctccagagcctcgtggtagagtgacttgcagtgctgtttccaagatgggggtgttaaagaggacgcaccccatgtaccagttcccaggatgccattcaggggagagaaggagatgtggatgccattccttcttttacgtgcctcacccctagccacagagtttatcctgagggccgtaagatcagggaaaagaactaggtgttctgattccctcatcttcccccattcccactcacagctttcaactgactggaaatatgagatcttcacatttgtgccttaaatattcctgatccctcatgcctaggtttgtgttcccccagaagcagaccctgaggaaaggctttgagttcaagaggtttatttgggagtgatctcaagaagcatggctgagggagggaagaaatcaggcaggaaaggcagggcagcgagttcccacgcttgcgtctgctgcggagccagtgcatggcacgctccgcaacctagtccagcccggtggttgagggagctagatactggcaccccagggaagatggtttccaaacgtgaggcccgcagttcctcccggccctgtatgcatgggcctgccattcctcccgacgagaagtggagtctatttctcctctattcatacccagactagcctgtgacatgcttttatcaggagaaggcagaaaatatcaggagaacggatgctaggcccattctgagacatctagaagcttccatttccatgctgtctggggaggccgccgtcatcctgtaaataatctggactcatgtactaaaaaaatgagacaccatgtaaagagaaagaagccacaggggccgggcgtggtggctaacacctgtaatcccaatactttgggaggctgaggcgagtggatcacctgaggtcgggagtttgagaccagcctaaccaacagggagaaaccctgtctctattaaaaaaaaaaaacaaaatattagctgggcatggtggtgcatgcctgtaatcccagctactcaggaggctgaggcaggagaatcacttgaatgcaggaggcggaggttgtggtgagccgagatcgcaccattgcactcctgcctgggcaacaggagcaaaactctgtctcaaaaaaaaaaaaaaaaaatagagaaagaggccacagggaggaacacccaagtgccagccatgtgaaggaagccttcttgggccctccaatcctctaggggccagccgaatgccattgagcacatgacccaagatcacaaagacctgaagccagctgagccctgcccagatttctgacctacagaatcatgagaaatacgaaactgttgttgttttacagagttactgcacacattattttttaggaagcatggatatccaatacatacaccaatggtcagtcgttggctgagagttgctcccaggggtgttaatttcctggaagttctggcctgcttcataggtaggcaaagcagccttcacactactcagagaaagcctcaggcagtgaaaggaaggttctctggcccttggagggagggctagtgtgcacgcaactggcaaaggcatgcggatgcaggtgggacccagagagccaggggtctccactgcttctgatgtcaaaacgtgttccttccaattggccaactgccctctccatgtcccagggcagattcctgcttctctagaaactgaaatatggcttctccctactcctgatcccttgaggcttcgaatctgcccatttttttcctgaaacatttaacacttctatgccagtcagtttaacaacaaataaattctaactcagcataaaatgtatgaggtaatgtggaatgtgtgtgtgtgcgtgtgtgtgtgtgcgtgtgtgtgtgttggaaaagcacagaatcaaatatatatatatctatacagtctcttttctcaagcagttcaaagtctacaaagaaacaaaagccaatccagaagcagttaccatcccgcactgttatcaagataaagtcaccccataaatgtgttgcttcctagataaatgtaatcctccatctaagacagagtgcctgctattttccttgtgtttctgtttgtggtgatgaggtcacccagaggactcagtctctcccctcgttgccctggtaatgaaaagcatgtaattaaaagctggctggtgagagcaacgaatgtgattctgtgacccaagaacagttttttcctaagcaaagctcattagatcacattaaattcacaataggtttaaattcacaaagtgtacactggaatgatcaggagcagggggttttagccagagaattccctaaacacagagcaggtttggaacctgctcctttgaaaatgtgaggaacccgagttgaagtcggcttttctagcacttaaggcaggagtggggtgcagggggctccttgcaggggagcctgattctgaggctggaagctgggatgagggaggggtaaagagggatgagggaccattagctgtctctgccgagaggatctacagtgagggacgtctggcagatgacacagtggggctgggctggagatgacttattcctggatcacattcgtgtttagatgatcaagccaaatcacaattagtttagtattttctatcacctaaacagctgcctcaggtcaccaggccaaaagatgggatatatgtgatttttttttttaagtttctgaaataccagggcttattcattcacttctgttgctgagacagtaggcctacctcttttgttgtagtacagattgaacatttctaatccaaaaatcctaaatgctcaaaacccaaaacttcatggctgctgttatgacacaagtggaaaattccacactggacctcatgtggccagcagcagtcaaaacacaagtgcaccccgcaaggttatccagcgtccttaagggaaaaataaaattaccttcaggcttatgtgcataaggtgtatacgaaacataaatgaatttcctgtttagtcttgggtcccatccccaagatatctcattatgcatatgcaaatattccaaaatccaaaaaaatcccaaagtcaaatccagacgcttttggttccaagcatttcggataagggattctcaacctgaaactgtttttaaagaaaatttcgaggagaaaaaagctgagcaaattccacactccttaaaaaaaaaaaaggatccagacttttctgttttgaccagtttgctctaatcaccctcctaaattttcccggaatgaacaccctcaagcaaccactggatttttccttcaccagatgtttgcccagagggcaaaaagaagagtgactagtgagcagagcagatattgcagcctgctgtctccaacccagcggccgtaactcaactttcaaagggacaactgtggactcctcatggaagtctgcatagagtaagatggcttcatatcttcctgggtttgaacctgcttgactttgagccagctatttaaactctctcagctttcacgttctcacctgaataaagggattgataacaatacctgcctcacagaggtgtcgtcaaagtactttgcatggtgtctgtgacatagtgaacagtcgtctaggatgactagtcaatgcatctagtcaatgctagcagctactatcattattattcgcactctacacagccagtgtggggattaatggcatgatgtgctttgagagggaaatttctcactaagcctattttttgtttatttgtttgtttaagagacaagatctccctctggaacccgggctggaatacagtggcacactcatacctcactgcagccttgaactcctgggctcaagcgattctcccacctcagcttcctgaacagctgggaatacaggcgcacctcaccacacccagcttcagtcagcctgttcttgatgcctggagtcccttattagagaacttctctggtttcctaaatattgttccttatttaaaatgcaacttagcacctccagaagtgtctgtagtgctctcttgtccccataaatgagttagttgtgttccaagatgcattctaccatgggctgagtgtcctgggtttctcaagacgtatatttcaatgttagggcatatgtacacaggcagttttggtagggcccaaccttcttgtatatgtcagtgcataagcatggtgtgatacagagatgcttaacccgtgggccccaaaacagggcattaggagatctgtgagtccctcgatattagatgcaaaattgccttggtgcccttgtacctctttggaaccaggaaatccatagcttttattggattctcaaagggctctatggttaaagattcatgatcatgggaacagctacctggaaccagccctccacagcctctttcaggtatggtgggtttgcaagggggcttggagagatcttgaggtggtattccagtctgggggcaggaagggatgggtggagaggcaaagcgatgagatcagtgacagtcagataagcccaagggccctgggtgtcctggtgtgtcagggtgagagagcagacccatacagagccaagccaaaccctgctgactcacagctttcctctggaagctgccctgcagtgagcgtgcagacagagcttccaagcagcccgagaaggagcaagagctttctcagcaggcaagggcgaggctgaggctgagagtggagcctctggccctggtgcaatcctgagcctcaggggcactgagttctaggcccagctgccatctgatctcgcaccagttcctccatctacaaagaaggggattgaggggctgacactagaggttccttaaagtttcttctgattcgaaaagaatgattctaatgatcccataagcttcctctttgagtatttcttacccaggaggaaaatctgacagattcaggttttatgaagcctgaagtgtatacaatttggggatagagttaccagagaaattcctgatgcccagttaaatctgaatttcagccaaacaaatcagaaaatgttaatacatatatgtcccaaatatcgctcatgacatacttatactaaaaggttattcactgtttacctgattttcacatgtaactgtgagtcctgaattttatttggtaactctgacaactgtagttggaatgaattctaagtaaaagaacataaaattaggattacagaattaaatacaaatgtgaaggtttattggaatgagaaaagtaatcacaggaagtcaccggagctttgaagatttaggcctgtttcagcaattggaacattctgcaactcctggaactcacagggatccccagtaagtgagaggcctcaagcctcaggtttataagcatcacagccaattcacatttcctgggatgttggcgtcttttctaaagccttctctatttattaccctagtttcattggttctcatggcagcctctcaaattatacaattgggtatttttgtaactccatctcttcatctcttattttttagtctttttttttatctattggagtttggatttttagcttttcaatttcatggaaaaaacagattttaaataatatttatgaaacagtataagccttgcagtttagactattttagaaacatcagattatattagttatatgggcaactggtaattttattgtctacattttataaagtctaaaaagagaaacaaggaataataaatttttctttcacttagaaactgctttagaggaacatttaattttgactgtagcctgcagatatgtcaagatctttgtgtacataaacacatatgcatatgtatatgttcctgaatgctatgcaggattaccttaaagcataactaagtcctccaaaatgattgaccagtaggaaatcagtcaaattagacaaaattgttctgtcctaagcatatattaaaatgtttatgagtaaaatgtatgtatattttaattatcataaatgaagtatccatggaagatattttgttatctttcattttaaatttgaactagtaggttcaatttttttcttattgaaagaaagtattcttgagcactgttacacagatttcacattattatagcagataatgtttttggccttgaaaattcttaatctcttcctaatgatggtagcaattggcttaaaatgtaatgtgatagaaaattaaagtgactataaaagaaaataaaagtaatttaagatggaagaaaaatgtagaacaagataagcagaaagaaatagagatgaaataccaagaaattaaatctattttgcaatttttgaaaaatggcttgaaataagttgtataatgtattagtggatccacagtggtaactgaataaactagttcactattctggatataccagtttaataatgtcataatttgtgcagccatttgcttgctttttccctctaaaatatttaaggcactccacttggctgtatgtgtataagcatgtaatgatggcggtggtggtggtgctggaatgtatagctgtgtgtaagcatgtagtcattgtgatggcagtgatggtgtgtgtgtgtgcgtgtgtgtgtgtggtaattgtggtagggctggtgaataccatataacttctctaattacttcatgatattcatcttgctttttattgtacaaattaataattataattaagtattactaaggctttctttttctgaaatatttaacaaggagtagaattatatcatctttaatctttaaatttgcctttctttttgaaaaggcgattaattaaatgctcagtagatatttatactatcttaaggttcccaacttttcttcgtgctttcaattagcttatttcttgtataggtaattatctgggcatcttttatgcatgcatatggaatgtttgtgattttttgtttttaaactgagtatacaactgctgatgaaatttttatccatgtatacagctttagctaggggaaagtaagtaacaaatattgcctcaccaaagtacttctccttattgtctgacccaaagatattctacagcttaaagttgctgaaaacatcggcctcttcttttaggactataatctctttacttactacgctgctaatatatttgttctttctctgagtgtatctgccccaagtttggttattatttagtcagccacttgtcattgtatgaggtcattgcattttcaaaattcttcttaattacagttattcaactttatgtatagcagatttctggaaatcctgttctccaactttgcacaataaatcctaatataaattagctgcaggaaatgatgcttcactgaaaggcttatacatatatatatatagctaaagacaagaattgcgggatacattttccatcttttggaaatatgcaaaagtgtaatttgaaggtaactatttgcatgcacaaagatacgctgtttcaataatagctcaaaaataatgcattatacagcatttgaacactaaaatgaacattacatttagcaataagagaaatctatgtattggtcttgaaaacatgcaaggcttttattgtttgttatgggagttttcagatgcaagaagatgtttttgaatggataaaagctgcttgaagacgtagtaaagaatagttgaagaatctgacggtttttgccgccatcagattggtaaaatgttaacattggaccgttccaagtttaaaaggactctcctacattgctggtgggagtacaactaggacagttactttagggataatctgacaataccaaatcaacttgaagatgctcatatcctagagcccagccattttattcctaaaaaatatatgccctagagaaattctagcctacatgcacaaggagacagaatgctcattacagttatttttgctatttttaaatagtaaaaaatgaaatgaatactgaaattagatatataaagacatttagtgtattcatatcatggaatgttatagagcagttaatacgaataaactacatggattactatagagaaatatcagaaatctaataccgaagatgaaaagtaggttacagaggctcagctgagtgtgatagcatttatataaaatttaaagcgacaaaaacagtattgagggggcacacaaggacttgcagttaaagtgttacaaatgtacaatgggccgggtgcggtggctcacgcctgtaatcccagcactgtgaaaggccgaggcaggcagatcacaaagtcaagagattgagaccatcctggccaacatggtaaagccctgtctctactaaaaatacaaaaattagctgggcgtggcggcgcacgcctgtagtcccagctactcgggaacctgaggcaggagaatcacttgaacccaggaggcagaggttgcagtgagccgagatcgtgccactgaactccagcctggtgacctggcgacggagactctgtctaaaaaaataaaaataaaaaaatacaaaggaaataaaaatataaaattaaaggatggtggttattcctggggaggagaggggggacatggaatcaggtatatagggtatgttgcctgtgtctctaatatataatttcttttttataaaataatacctcaaaggcagtggtcagagggaaaaaaactgagatgttctccttaccatgaatgaatgtatgaataatgaatgaattaaaaaataaatacagatgaaagcagatgctattgataagagacatgtaacttcatttcatatgcttgatacaacacagataaagatgaagactgctaaccttgctaaaaatgatgattctttattcactagatttaacctgatggactgctttcagttgtgatggagacaacgaaaaagaatgacaggcttggaagtatatcatcaagcattatatctaaaaggaaagtaatattattaaggattttttaagaatttaattttttggcatgatatttctctattaatatagaagcctgtggtttgattttatcatgtctgattttcaggcatgttttcaggtaacctttacgtcaggaagatgctacctgccagctcccaagagttattttatcacacatcttaataaatacaacagaatgatgatcacactcccctcccccgcccccagcgctatttctcctcctttttccctgccttgtcctctcacactgcaggtgctcacccaggcatgcaaactagaatctccaggctggggccctacccacccttcacctgcccctgggctgccaaccacagtcttcttgctgatatttgccccgtgtaacgtccactgcttccactgctgcctccttcaggcaccagcagcactgaattgctgacagtaaaagccccactaggctgcccactaagccgtcatcccgtggcgctgcacccactgcttctccccagctcctctgcataggtctgcccttcactcccacgcagaacacgtggctcacgagatgttctgatgtgttgaccctcttgtgcctcttgctctgtcacactgtactgtgtcatctgtccctcctctctactggacctgcactccctgaggacaggaacaacgtccaagggcatctttgtctcatgtataatgcattgcatgaaatccaactgggcgctgtggttcacgcttgtaattgcagcactttgggaggccaaggcgggcagatcacttgaggtcaggagttcaagaccagcctggccaacatggtgaaacccccatctctactaaaaatacaaaacttagccaggtgtggtggtgcatgcctgtaatcccagctactcgggaggctgaggcaggagaattgcttgaacccaggaggctgaggttgcagtgagcagagatagtgccagtgtactctagcctgggcaacagaatgagactctgtcaaaaaaagaaagaaagaaaaggaaggaaggaagagaagagaagagaaaaaagagcaagagaaagacagagaaagagagagagggaggctgaggcaggagaattgcttgaacccaggaggctgaggttgcagtgagctgagatagtgccactgcactccagcctgggcaacagaatgagactgtcaaaaaaagaagaaagaaagagagaaagagagggagagagaaagaggaaggaagagagaaacagagagaaagagagagaaagaaaaagaaggaaggaaggggaaaaaagaaaggaaagaacgaaaaagagaaaaaaagaaagaaagagaaaggaaggaaggaaggaaagaagggaaggaaaaaaaagagaaagaaaaagaaagaaagaagaaagaaagaaagagaaatgcatagtgggtgctcaataaactgaactgggaagtgactgataatccagactcagtgcaaactactgaatttttttaaaatgttgtgctactggcaaaatcctttagtgatcagatgcccagcctggttctaactacatcctcattttctgttgtcattttgactccccatcatcttctgaaatcccctcttttttctctctcttatctactgtctacattcatttgaactgaaatactcatttccatgtatctgggctgataaaataattgcagagatttttcatgcaattaactcacagagtagactctaagtacgctgttggattttctatagcaccacatactgctaagtctaatttgcaaccatacaaatccatgacatgttggaatttaaggaggttcattagcctacaatatttactctgcaaaaatgtttgctggaattgaaaaagtaacctccctcacttcacagaaatcactgactccctttctgttgcttcagggcaaccgccagataaactccccaacttgcaatgtaaaaatctggaatggtggttgcttagtcttttctacacatttacaaggggctacaatgaggcagagagtaaatcacacatagatggaagctgtatgtcccacactggagcttatatcggtcaccatcttcttgctgggtctttcccaagaaatctctttggaaatgggaagttatgtctggaattcaggtggcagaaggccacctgtgtgcctactgtttggaagtcaaggatggaggagggtgcaggaaagcatattgcattggcaccaccaaaatgatgcactctaacctgaggccacacacaccacacacacacatgcttctacaggatgtatgccaatccactagccgcgtcgcccacgctcattcgcaggtcctgaaagctagcccaccgtgaggccaggaggaggtgttttagaagagaataaaaaactaggatcaggcactgatacgggatgaaaaagacgaacagagactaatgatgaaatagaataagggcagaggagaagtgtgttgagtgtgtgggcagaagcactaggaagggcaggattgtagaggcacatatggtgtacaggggtcctgacacagccgtggcaaggagatgctcagagcttctgtggccaggacacgatcgttgcctaaagagaacagctgcgagggacattgttgacggagagggacagagcggtcctgcagctctttgggatagggaagtaattccttcactggggcagttctttgtacctatgggaagttccgaggtcagtattcttgtttaagaatatattgaggttattgagattccatattattacggaaataatagttgtgacatttagtacttctgttaaaataataatcaagtctacatataataatatttaaaaaggttttatatgtacaagtaaatttttttaatcaaaggaattttcttcaaattggactttaaaataaaaatggagaaatatgggcattaactgcaaagatatgaaggactaaaatttcaaaatctaaaaaaaaatcttaatttcacttaatattctagaatacacacattctgatcagtttctgtctacaagaaagtggaatagctcttgttttttgttttttttttaaatggcgtgagcccgggaggcggagcttgcagccagccgagatcgagccactgcaccccagcctgggattagtttttaaatgttgatacaggtataataaaaagatcggctttttattacagttctgtaactgcagaatggttgatggaacctgcatgtccatcacaatcaagatgtgttttctactggctttgattgggggatagctgtgcgcaaagcagaggcccaggccctgtagacatcacaagagaagacacacttctgacatgcacttaataccacagttcccattaaaccagcgcactgaacataaaacaacctgacccagagtaacattttattttattttattttattttattttattgagttacagagtctcactctgtcacccagtttggagtgcagtggtacaatcatagctcactgcagccctgatctcctgggctcaagcgaccctcctgtagctgggagtacaggtgcctgctaccatgcctggctaattttaaattttgttttattttattttattttgtaaaatggggtctctctattttgccagggctggtcttgaactcctgggttttcctctcaccttagcttgtaaagtgctggattacaggtgtgagccaccacgccccgtccttttttttaattggaaagataattacaacaaataactatatacacgcatatagagagaagagacgagttatccataaaggcagaataaataggtttgccattggcatgttcctaagacattaatagagtaagctatattttccctagactgtttatacttgtgtcataaacacgtatgtgtcacaatactgtgaaccactgcatcacaccctccaacacactcacacacacacacacacatacacacacagagagagagagagagggagagagagggagacagagagagaatgagtctgttctcatatagttgttatattagccacaaggttaatgatagacttccatgatcgcattattcttaatcttcagtggactgggtaagggatatccctccacttctgacatttatttggcaaacaaaatccagctgctgttccatgatgcaccattccagcgactcgtcaaaactcatctccagagcgaattatgcccccaaggagtcgagtgagtcacaccttccttcatcatttattatcagctcctagattccttatttaattcccagaaagtccaggctttttgaaatagaatgttgccttgaaataatcaatatgagattaaattcaactcatgaagattgttcaacacagagacatttgcaaaagacgatgattttcacgtggccgggtgtggtggctcacgcgtgtaatcccagcactttgggaggccaaggcagcggatcacttgaggtcaggagttccagaccagcctggccaacatggagaaaccctgtctctactaagaatacaaaatagccaggcatggtggcacatgcctgcaatcccagctacttgggaggctgaggcaggagaattgcttaaaccctggaggcagaggttgcagtgagccaggatcgtgccactgcactctagcctgggtgacagagagagactccatctccaaaaaaaaaagaaaatgattttcacacagctggaacatgtttttttaagaacattcataaaagtagtatcaagaactactattagtaagctgtgttcacaaagaaaaatattccgctatatctgcacctaaagtcctgtccatacaagatccaaaaaacaagacaggaaggggaggatgagctatccagtggttctcaaattgtgggtgccaagatccccataacattttcagaggctcctcaaggtcaaaactgtttgataagaatgtcaatatgttactctgcattgtaagtatcattgtcccacgagtgtgtagggtgtagtaaacatgaactgtgacatcacaaccagctcaactgactgaatacagaaacagatatgagaatcaagctctcttctcttaagccagatattaaagagattggtaaaaatgtaaaacaatgccattcttcttcctcattattgttgtttgggaaaataaaattgttttgcataaaaatatgtcatctacattaaaataatggtttattactgttattttaaatgaattaaataataattgaaaagatttctcagctttaggctgggcacggtggctaatgtctataatcccagcacttcgggagaccgaggcaggtggatcacctgaggtcagaagttcgagaccagcctggccaacatggtgaaatcctgtctctgctaaaaatacaaaaattagctgggtgtggtggcggatgcctgtaattccagcaacttgggaggctgaggcaggagaattctcgaacccaggaggcagaggttgcagtgagttgagatcatgcactccagcctaggagacagagtgagactctgtctcaaaaaaaaaaaaggaaggaaggaaggaaaggagggagggagagagagaaggaaggaaggaaggaaggaaggaaggaagaaaatatttcttagttttaatttcgaatacaataaatattgatagaaacagcctgcatataacaaagctctcgggggtcgtcaattatttttaagaatgtaggtttcctgagaccaaaaagcctgaggatggctgaactctacaaatggctgagtacatttactgtcaatttggaagcattctctcctaaaaaatagtgtttcaaaaaaatgttttctgtgactcagaggggagttttccatagagaagcttcttgcctggctatcagttggctgcacctgagctagtttccatctgaccttatctctaacatcctctatagctcccttcaggcaaacaaagtagaaggacttggtgggggctcggacccaacagcatattattcttggaaaagacttgctctgggtcctgggcctcctcaaagcttaatcagtttaagccagtgcttccaaagaggcccaccttctccacctgcctgtctaaaattcatcatatttgagcttttcttggactacaagcggccatttgaaaataagtatcttctgattgcatcggaattacctgggaggttttttaaatatgaaggttcccaggcctcatactagacctaaagaatcaatagcacagagctgaaaggagcatgtctgctctctgtgacaagctccctccatgacgcgtgatgcacactgtccccagaaggcacagtctgtgcctggagatcaaaggaagctcgagaccggggcagcccccagcacctaccagtgaagtcaggcctcggagggggcccaagcatacaggagccggtgcaaggagaggtgggccaggtgctccagggccttggagagtcttttcattgggaatagtgactaatagaaggtaagaggaagaaaagggagaccaaaacggaagaaataccaggttaagaaggaggttccagacatgagggcccaggagggctaaactttgaacatttcacacccccagttttgtttagagccagctccaagccttgatttagtgaagactcaatttagactctgaattcagtccaaaaggccagctctgatgaagactccccggaaacataagcagagaaaaaaatagatttttttaaatttttttttaaattttgtgggtacatagtaggtatatatatttatggggtacatgagatgctttgatacaaccatgcaatgtgaaataagcagatccaattacattctttaataaacaattattattgactctagtcatcctattgtactatcaaatagtaggttttatttgttcttttttttttttttttttcatatgtgcccattaaccatccccacctcccggctacagagaaaattttaaaaccagaaagagtgatcctataaatatgatctagaatgattacataaataagcatgaaagtggtcatggaaaaagttagaagatccaaagtcaaccacattttcacctacaaagtatgtttggaggaagaaattctgtgtctgcatgttctcctggccaggtggtacaggaagcagggagccagagggagaaggttctaggctctaggcctggccattctgccattacctattgtggggtatcttataaaacaaacaaacaaacaaaaaacctcatccagaaatagcctaagagtatgtatgctttactcactttctttgctgttggtgccatggattagtcaatgatgctttaatgcaaaatggtgagaggtgacagcgtgctggtagtcctcacagcccttgctcgctctcggcgcctcctctgcctgggctcccactttggcggcacttgaggagcccttcagcccaccgctgcactgtgggagcccctttctgggctggccaaggccggagccggctggctccctcagcttgcagggaggtgtgtaccgagaggcgcgagcgggaacccggagaggagcgagccagagaggcgcgagcgagagaggcacgagcgggaacccgggctgcgcgccgcgcttgcgggccagctggagttccgggtgggcgtggtcttggcgggccccacactcggagcagccggccagccctgccggccccgggcattgaggggcttagcacctgggccagcggctgcagagggtgtactgggtcccccagcagtgtcagcccaccggcactgcgctcgatttctcgccgggccttagctgcctccccacggggcggggctcgggacctgcagtccgccatgcctgagcctcccaccccctccgtgggctcttgtgcggcccgagcctccccgatgagcgctgccccctcctccaggacgcccagtcctcttgaccacccaagggctgaggagtgcgggcgcacagcgtgggactggcaggcagctccacctgcagccccggtgcgggatccactggtgaagccagctgggctcctgagtctggtggggacgtggagaacctttatgggtagctcagggattgtaaatacaccaatcagcaccctgtgtctagctcagggtttgtgaatgcaccaatggacactgtatctagctactctggtgggaccttggagaacctttatgcctagctcagggattgtaaatacaccaataggcagtctgtatctagctcaaggtttgtaaacacaccaatcagcaccctgtgtctagctcagggtttgtgaatgcaccaatcgacactctgtatctagctactctggtggggccttggagaacctttgtgtccacactctgtatctagttaatctagtggccacgtggagaatctttgtgtctagctcagggattgtaaatgcaccaatcagcaccctgtcaaaacagaccactcggctctaccaatcagcaggatgtgggtggtgccagataagagaataaaagcaggctgccccagccagcagtggcaacccgctgaggtcaagcttcgttttttttgctttttacaataagtgttgctactgctcagtctttgagtccacgctacttttatgagctgtaacactcactacaaaggtctgcagcttcactcttgaagccagcgagaccactgagctcaccgggaggaacaaacaactccggacgcactgtcttaagagctataacaccgccaaggtctgcatcttcacttctgagccagcgagaccacgaacccaccagaaggaagaaactcggaacacatctgaatatcagaaggaacagactccagacgcgccacctcaagagctgtaacactcacggcgagggtccgcggcttcattcttgaggtcagtgagaccgagaaccgaccaattccggacacaatagtttaaaacaagcaggttctatatgcaaacccttcaccaatttttcaattgccctttaattgcaaattgttttcaaagaaggctttaacctggtggctctttcattggttccttctgttcctgagcatcctgtgaacatgtagaccgttcacatattcatttttaagctaaaaatattgaatttcaggaaaggcctagcgaatttgggaaaatgtaagtaaggtagaatccagtttatgggataatttttggatgcgagaatacttttaaaccttcacttatgattgttattgcacaaacgagattggtctgccctagcaagtctcaccgaggttttgcaacatatttacaagtacaaatctgtgtggcaaagagtactttttgtactatgggcagctttgataacaagcggaggtaggaggaactcaatttagccctatctgtagtgccttcacaaagaaagctcttgctctttgccttaaccttccccacgttcaatataagatagaaaaaggaaagaaagatttaccttgtacaggcctttcagaagatagactgcggaattacagaatgcctaatgagaagcacaattcttttctcagtggtttgttgctaagaaggatccattgttcattttgttggaagatatgagatgcttttgactacatcagatctatttaatacatgaccttttcagtgatttcagcagtagatactcctaaagcattatgagacatcttccataaacattttttctccccaaatcagtttttagagtactttatgtatctgttacgacatccctagtttcataaaagtatataatatcagtgatccagctggttagaaccatcagtacttcacttttgatgaattattttttagtccctttctattctttttatcccccacctcaaaggaactttcacatgataggtactcagcagatgaaggaatgccctgtatggtagcgtagttgaacatgacatgtcaatgaagtatttaagatgattcagagaggtctctctggatgacatgctcaaggtaggtgaggtccttggtataacggagatctcaacctgtatctaatgtggtgaagggtaacacgggaccatggagagggtaacacgggaccatggagagggtaacacgggaccatggagagggtaacatgggaccgtgaggcaccaagaggcagactgcactccatgaccctgctgcctgttgacatgctgggacagggaggacctaaaaactccatgttctcggctgggcacggtggctcacagctgtaatcccagcactctgggaggccgaggtgggcagatcacctgaggtcaggagctcgagaccagcctggccaacatggtgaaattccctctctactaaaaatacaaaaattagccaggcgtggtggtgggtgcctttaatcccagttacttgggagactgaggcatgagaatggtttgaacctgggaggtgaaggttgcagtgagccgagatcaaaccaccacactctagcctgggtgacagagtgagactctgtctcaaaagaaaaatgaaaacaaaaaactctcgagatcactctagaattagttctattttttcctggatttttaacctataacattgttttctctgaaattttatttatttcattatatattcatgtttatattttatagtttttttcatccaggcatgaatgaactaatttattcaacaggtatatatatatataaaatgtacctaccatgctatgagatggaaggtctgttgatttcgttaacaactaaaaggtatatttgattcatgtggtagtctagacccatgcttgtatctatgcatgagctatttgtttgttcgcatatttatttagttttagttgtctgtatgggaattcataattggcttgagggcagaagctggtgttctgcttacctctgtatcataagatcacgtagatagtaggtgattaataaatgttgaaataacgttaaacaaattacaccaactttcttaatggaattgagacaaattataattaaaaggtttatcccatcagtatcaaattcaaagtatctgggaaaatcttgcagaagaaatcgggaaagatattaagatgtagttagtgcaaatttaggctataaattagactctgagcttcctgatagccagagtaggaggaaaatttgccaaggtacattggaaacagtgataggtcctatatttttattttattctattctattctattctattctattctattctattctaccctattctaccctaccctaccctaccctaccctaccctaccctaccctaccctaccctaccctaccctcccctcccctcccctcctctactctctactctcctctactctcctctacttttgagacagagtctcactctgtcgcccaggctagagtgcaatggcacagtctcggctcaatgcaacctccgcctcctgggttcaagtgattctcctgcctcagcctcccagttagctgggattatgggcacccgccaccgcgcctggctaatttttgtatttttagtagagacagggtttcaccatgttgtccaggctggtctcaaactcctgacctcatgatccgcctgcctcagcctcccatactaatagatttttattattattttactacattagaggccttttccatttataattacatattttttgggataataaatattgattccacaaattactttttttttttgcatacactgggtacttgtagtaaaaaggaaagcatcgaataatcttatgaaaaaataaaagttcatctttctgaaagtgaaacctccttagcctttttaatttagaactgattaaattccttccctgtttgagattataaactttacatataaactgtgcctaaagcaaaccaaaagcctaccccaaactcctaccaatgaaaaatacgtaagaagaagatcaaaatacctggaatggttgattgacccctagagtagatgtgggcattgtgtataagaaattttcctccaacagtgatgtacagtaacttgagaaaatacacctagaaccatttatgaattctcaaatgaggaaaatatctaaacatttcaatgaacaaagagctttggttgctaattaagaactgacagtagaggtttttgatttttttctccaagatcatttaatgttcaggtgatcctagggaggtcacaaaccttgtgaagcctcagtttcttaaccagcaaaacgagaatcataatacctgcctcataagaaatcaatgcagatcaatgagattatgtacatggacaaagtttacaaattataaagttataattttggtcctatagattctagcattgacagcagttaaacttgagttgggaagtagtcaattttttgcaaccatgcatatatgattagtcaaattcatgtaagtataactaatttcatctgctgctgagatccacttaatttttttgctctgtaaatggatacaatttaaaaatgtattgagttcagtggctcaaatgaatctgtattgccattcttactacacaacttgattttatattttaaaagcttgtcttctgtaagaagcatgaattcacagtgtctctccatagatttaatacctgtttatgtacaatcatcatgcaggatagtcttatgtgtgatgcagttcttctttttccagcatattcttttcttggcattatttacacttggtctgaataagcacatttagatagcttaatggtacaagtgattacaccatgcttttgagcttttatgaggaaaattgaagtatataattatacttttgcacaaactggtttgactgttctcaaaacaaaacaaaagaaaaaccctgactctactaatttttcaaatggctgcaccagcatgtttagaagcaatcaatcagcaacaatcacatttcagataaacctcaaggctaagatgtcaccaaggcgaataggagaaaatgatcggctccagtggacgtgcaaaaacaaactttttaaaggaaagcaaagatcacagagtccccgatccattccctggggctacacagtgaaaggatggatgctggtgagagctggagaaatgctacagaaggaaccaaactgtcccttctggtctgccaggctggcacacaaacagtggaagggagcagttgccaaaggagcagaggcacaagctgggacagagcatgaagggcttgagagcgtccagtggcaggaagacagggaaataaggaacttccttatcctgacaacatctgaacctcccccaccgctatagggggagcaagcccagcagtcatggtatctgaacaacgcaggctgtgaaccttggccaagccactttccctccggagcacctgctgatctcttttcttgacaactccctctgtaaggcagggggtagatggcccaacaatctcctgagtccttgtctcattccttcattctcttccagctagggagcaactgctgggattgcaaaggtttatttatttatgtatttatttatttatttttggtatttcattttctttaattgcttgtgtccagcaaaaaaaaaaaaaaaaaaaaaaaactctatacttctatatgtaaaaaaccctaaatatggctgggagcagtggctcacgcctgtaatcccagcaccttgggaggccgaggtgggtggatcatagtgaaaccccctctctgctaaaaatacaaaaattagccgggtgtggtgacacacacctgtaatcccagctactcaggaggctgaggcaggagaattgcttgaacccgggaggcggaggttgcagtgagccaagatcgcaccactgcactccagcctgggcaacagtgaaactcggtctaaaaaaaaaaaaaacctaaatatgggatatctgtttctgcatatacaaataaagtgtgtgacttctggagccagttcctttcacgtgtatgaagagggacagagattagtaatactgcttaaacgtgcttacagcctagtgccaggtgtacatattcagatttttttatttcttaatttgagtaatgccttttaagccacattaggtatttctttgacaatagcaaaaggaaaaaaatatatatcatttatgacgtttcacaaaatctcagtctcgccatttataaagttcacaagtttacaaatggctaatagagattcccaagaaattacctgataataagagtacttacctgtgactcttcaacaatattcactattacaacaatattcactattttaaattccagaagtcattgaagtgctaattttataataatactcagtcaaggtatttagtagcgtggtgataacagtactcgggaatatcctattcatcctcctatttcttccagcctccttgcagttagacagggtcacataactgtttctggccaatggatgtgaaaggaaatgaagtgtgtcacttccaggccaaggcatggaaaaaccttgagcaattctctagttctttaaatctgcaaggttgacagaagtctataagataatagagactttagattgaagcaagctgcattgcaaatcactgcattgggcagtgtttcccagacccatagtggacattacctgagtgagaaataagcttttactgtatttttaaaaaccctgaactttaggagctgttatttactgtagcaagcgtagcctgttctaatacagagaagaatgggtttcagttttgagagctaaccaaaaatctagttagactcttaaacatttcaacgttttaattaaaggcttagtagcatgtatcaagaactggaaggctttttctacaaaggaccagaaagtcaatattttaaggttgtgtaggccagataatccctctcataactactccactctgccattacagcatgcaagcagccatgataattcataaagtaatgatcatgggtatgcttcaattttgtatttatgaaaacgggtaacaagcagaatttgatgcacaggccacagctcacttccccctctgatagagcatcactgttaaatgtaataatcttggccgggcatgtaggctcatgcttgtaatcccagcactttgggaggccaaggcaggcagatcaattgaggccaggagtttgggaccagcctggccaacgtggtgaaaccctgtctctattaaaaatacaaaaaattggccgggtgtggtggcaggtgcctgtagtcccagctactgggaaggctgaggcaggagaaccacttgaacccgggaggcagaggttgcagtgagacgagattgcgccactgcactccagcctgggcaacaagcgtgaaactctgtctcaaaaaaaaagtagtaatcttgaatacttagtgctctagtttcccagggctgctgtaacaaaatgccattggattgcttaaaacaacaaatatgtatacaatatatatttattatattattatatattatatttataataaattataatgtatttattaaatatatataataaattatatttattatattaatatataatataatatattgataatataaattatataatatataatacacacatacacatatataaatatatgtatttaatttttctcatacttctagaggctgtaagttcaaaatcaaggtgttggcatagttggttccttctgggaatttagggaggccgtgtgttccatgccgccagcctcacttctgattgttgccagccacccttggcttgcggcgtcattaccccaaactctgtttccgtggccgccttctccctgtgtctctcccttcttctttacaaggataccactcatgttgcattaagggtccacctttttctccaggatgattcatcttaactaattatatctgcaacaaccctattttgaagtaaggtcatattctgaggtactgtgggttaggagtaccccagtactcctatttgttgaacaacaaatcattttggggtacacaattcaataatgcttggctttttaaaaaacataaacataattagtaaatggacaacaatgcgagtgaattttttttttttatttcaatagcttttggggtatgtgtgggtttttttgttacgtggatgaattacatagtggtaaattctgagattttaatgcaccagtaacccaaatagtgtacattgtatctaatgtgcagtttttatccctagccccccttccagcctcccccttctgaatgtctaaagtccgttacatcactctgtatgcctttgcgtactcacagctaagctcccacttacaggtgagaacatacggttttcggttttcaactcctctgttacgcaagtgaattttaaatgagatcatgtgccttggctttgttcagagaggtcagttcaattaccttgatgacaagattgaattgttcaggtatctaagagcaatggaaagaaaaactgagttcataagtaaaataacacataggacttggtaatgcacatttacaattcagtattattgttcaggcttctatcttttctaaatcatcgattgatgctttagatgagaaaattaaatttgatttacatattttatttcttaagacttattaaagcatgggactaatgaaatgattatttcttagaatctgaatgcaggcatctataacaatttttggaaaaatactccacgattttcttggcaggttttggaaccttgaaatgtgaaaaagcagcacacaggtgcgcattaaacaggtgctttagacagtacgtatgagtagttcagaggaaggagagagcaccagggccagtagggctcctacctggaggaggaggcacctgagctgtgctcagaaggtggccagtatttggatagtctagctagagagcatctgatatgagcaaaggcaggaaatgacacgtttgtagggaggatcagagatagcaggaacatataggagaaaacaggagttattattgctgagtggttgaaactgatatgaaagaccttgaatgtcagcctaagaagagttcagatattacacaggtgaacaagaggtttctgagcaaataatacgatcaaagctgtgtggcaccctatacaagataaaagaggcaatggattgatgagggcttattacaatagtctagtcatcacaaaaagaggtgctgagcaacatgacagagtgatggggtagcattaaatgagtaggattggatcaaaagaagtttgatgatcttggtgactggagttatgagacagggaaaatcatgaaggagaaaaagataacccaatgtagcaacaagagtgagggagaagaggaagaaggcagacataaatacaaggaaggatcacaggtcaaattccagctaattacaattagagtgaagactaattcatcaattctatttgaattcgtcaagatagaataaggggccaggcgcagtggctcactcctgttaatctcagcactttgggagaccgaggcaggcagatcacctgagctcaggagttcaagaccagcctggccaacatggtgaaaccccgtctccactaaaaatgcaaaaattagctgagcatggtggcgggtgcttgtaatcccagctactctggaggctggggtaggagaatctcttgaacccaggaggcagagtttgcagtgagccaagatcgcgccactgcactcctgcctggacaagagcaaaagttcatctcaaaagaaaaaaaaaaggataaggtatccatggttacaaataaacacccatatttcaatagcttaacacaaccaagatttattatgtgttcatgctgtatatccagtgcttattagacgggaactcgtttccactgattcattcaggtggatccaggataacgggtattgcaccatgttgtgatgctgccacctcaacatggagctgtatgagaggaagaaagagcatgtgccactcacatcactcttaactgcatctagcccatttgccagaactagtcacatagccccaacccaattgcaagagaggtaattggaaaattggtaattttaaaaggtaggggaagctcatgaactatctggtcagttagacctgacctggggaaagaagagaaattaaaaatgggttgagtaatcagatatgaactaaggaaggaggaaaagtttcaaattgtttgaaatcttggcattttgacatcacattgtcctggactttcttccctctggaagagacaaaggactcattatctgagagagaagccaatagttctaggacatgctgatactttaccaaggtgcaggaagacatggacccacacagcaaggtttgcagaagcagtggtgaaaaaaaaaagtttatttttccttgcactctgtaaaatctatctcattcaataagcctatacatgtaaatatctctgtgacactaatacataagtcataggttggtaaatatgatttacattgtaaataaaaattctaatataatattgaatccttgttaattattttcattggtgattgatttgatgggtgattatgtttttaggaatttaaagtgtgtgtaatcagatatccattaattaaaactatttaagtgagtgcctatatttgagtatccacagtaccctaccaaaaatctttacgctactttttcaagccttttacatatgagagaaagaagcagacaaataactaatcttaagacagtgtgacaagtgctataaaaggaatgtaaatagtaatattagatcagagagtaaaggtacattacctcccctccgtggaaagatccagaaggcctccctagaaggtgatacttaatctaatgtttgatgtttttatttaaccattaaccagaatgggttgaaaaagggtgaaggttattcttggaagcaaagctatttaacccaaagtcatgcaacagaagaacccaacttctcagagagctgtaaatatccagcttggtaagagtattaggtaatattcagtggtgatggggaatgagactggaggtactcagaacatagattggaaatagacctgtgtgacatgttaaggaaactggagaatgttttaagccattgagagtaaaataaaaggattattgctcttatgtttatatatatgttttaaaaatagtataatattttgtaaaaaccttttatattgtcactatccagagagaattactaaatatattctggagtattttcttccattatttacatatttatacactttttatcctacttcaattttcatattctacatttttacttactattatactgtatcttccagcatcattgaataatttctgacaacatgatttctaatgagtgaccaatattacaacaaatgactctattaattttgtttaacctttcctttactgctaacaattgggttgttccaaatgctttgcataagcatccatgtataaaaatctttttaattaaaagtgcatttttatgcctttaagatagagttcaggctgggtgcggtggctcatgcctgtaatcctagcactttgggaggctaaggtgggaggatcacttgagcccagaagttagagaccagcctgggcaacgtggcaaacctgatctctacaaaaaaataaaaagagcaaaattagccagatgtggtggagtacgcctgtagtcccggctactcaggaggctgaggtgggagaatcacctgagcccagggggagtttgaggctacagtgagctatgattgcacgactgcactccagcctaaatgacagagtgagaccctgtctcaaaaaaagaagaaacaaagaaagaaagagttcataaattgaattgctatgtcagaatgagtaaattcttttgagactatgttttactaatatctaaatttaattccacaaaaattttgcttatttacacctttctgtcttgcctcagtagcagtgtaaatattctatttctttataggtttatcagtgagacaaattatttgcttttattagaaaagcttgttagattttttaataaactaagtttttaatggacattttaagagataatctttgttaaataaaatttgattttttaaataaaagaatttttaaatcaaagtccagtgaaaaaatgttgaggagtatatacaaatgcaaggaagaaaaattaaataatttcaattctatttcctataactaaggactggcaacatattggtatttagccctctagtctttaaactgtctctcattaaatacgtttaacaaaattgagacctactggttgtaagtatatattttgcctttttcatatactgtagagcaagtgttgtatgagatcattaattagtcttcaaaatatggcttgtaagggctgcataacatcttatatgaatgggccgttttaaataaccattcctgtattatcggctagttggtttcgttctaatttttcatcttcacattaacatctttgtgcatgcttctcatgaattccttgagataaattgccaaaatggaaatgttgagtaaaaagatttgaacatgttttatgacttttaattcattttgtaaaatggcttttcaaaaaaatactcatgagtggaatgagaggtattgtttcacaacattcagatcttattcatattttaaattttcctatttgacatgtaacaatttttaattctaattttattatatataatatttaatagcattttaggtctttctgagcaatgtttatttggtcatattttgaggatttagtgccttttttttttttttttttgctgttcaaagtctttctcaagaccactaagattattaaccatttatctgtaataattattcacagtgcttgtttaccctgtatttcaaactgctgagttattggattttacttgtgtctaagttggctatcatatatctttcagtaaattttttaggaagcgtacaggggtactttctgagcctttacacatatacaatatcccttctgttgctatcacacgtgaataacactttgcaggatacagaattcttacactgcaatcttttccttcacaaatgtataactattgttgtttgatatacagaatagtggagacaaagtctgaggctagcctttgtatgtgtgatggttaattttatgtgtcaacttgactaggccacagggtatccatttatttggtcaactcttattctgggtgtttctgtgagggtagttttggatgcacttaacatttaaatcactaaattgacttgttgcaaaatgttcacttccttttgtggatgagccttatccaatcacttgatggcctgattggaaccctcaaaatttccctgagtaatggagagaattcctcctgtgtggtggcctctaaactgagacattggttttttcctgcctttggacttgaactaaagtatcatctcttcctgggactcacacctaccagccttcagttcatactggaacttaaaccattggctctcctgattctccagcccactgactcaattccttataataaatctctttatacacacacacacacacacacacacacacacacacactcacatcctattgagaactctgagatagtatgttaccattacctaggttttttcttctgctttcatgcctatataatttattttctttatctgtgaaattaaaaaaatttactattacctaggaatggattgcttataatcattttatttggaactcagaatggtttgaatgggtgggaagttgcaggacctcctgcgtgaaagctgttctctatgtggagtgcagtgagggaggtcatccactaggagaaaggaggtactaaattctgtgacttgatgctgtgcctttagagttctcatctctgttctctgttcctgtcaacccaattgtgttgtttacaatgctacttttctagcttagtattggccttccactgctttgattcagatgtggtctaggtccagctctctaatctgaaccccttgccttttgcgtttagcaatcattttccatatatactcatgtgctgcataacaatgctttgatcaatgacagaccacatatatgactattgtctcataagattataatggagctaagaaattcctatcacccagtgacatcatagccattataatgtcataacacaacacattatttctatgtttagtatgttttgatgcacatatgcttaacactgattacaattgcctagcctattcagtatagcaacatattgtacaacatctttgtagcccaggagaaataagctgtaccatctagcctaggtgtgtagtaggcttgtaccatctagacttatgtaaatacactctatgatgtttgcacaatgacagaattgcccaatggcatatttcttagaacatattccctttggttaagtgacacatgactgtttttatggcttttttacccagacttggatttgagcacgagaattaccttgtatgcacctttcacttagtaggctattagttatttttgttctccggtttaaattaaaaataaattgttatatacatatatgtatatatacacataatacagtattattcagccttaaagaaaagatagaaatcctgccatttggaacaacatggatgaacatgaaggacattattactttaagtgaaataagctagacacagaaagacaaatactgcacggtttcagttatatatggaatctaaaggaagtcaaattcataaaagcagagtaaaatgttggttgccaagaactgggggttgggacaaatgtggcgatgttggtcaaagggtgttaagattttgttatgcacaataagtaagtactgggaaatctaatagtgcacagcatggtgactatagttaataataatgtattgtatatctgaaatgtcctaagagagttcatctttagtgttctcaacacacacacacaaaaacatagctatgtgagatgatgaatatgttcattagtttgattgtcgtaatcatttcacaatgtatatgtataccaaaacatcatgttgtacatcttaaatatacacaatttttatttttcaagtatactttaatcaagctggaaaaaaataaattgaaatggctatcaaattttctctcactgcaaaaacacacagttacatatttttagatctccaactcctttggatcactattgataataatcaaattgctgtctcaggctggccatcaggctttgtccttttaaaaaactgtatatatgcagataggtatatagaattgtcataggcaaagagacaaaattgcacaaaaataaaaatcttattgaaaaatgtacctatcctaatgcaaatgttttccaagtgattttgtcagagatgtaagagagaacacaagtggttcaatgctactaaaattccgtagttgaagatttctgtataattgcctacagcttcattcaacaataaatatttagtaagacctactatgtgtcaggcactgtggcatgtgagacttatcagtggtcatatccatacagatttttgaatttatgccgccaaagcctgctacctgcataatacacaatgaaaaccacatattgctgaatgtaatttagtattctatcattcacaataaaattactgctttacacagatgatattatgcttcataattactagagacttgagtggctacaatcaatgtaactgttacatattcaaaacacattttgtagcttatcgcttctcattgttagggttgtttttgtaactcatatctcttatgttctgcacagtgtaatccatacataggtatgtgcacacatctatacatagccgcattccctgaaaaataacttggagtcctacataactctatagagaattctgggagctcctgtttacacacaatgccctatgttccaggaatgttggttcttatggttcttcatatttactgagcttattttcttctatccaatttccacctcactcctgaggctgttaggcagcacctagctgtttcccacccatttacttttattcatgcatcagttactcaaccagtcagtaacaaatatttcccacaagccgtggaccacagaactggatctagagacacgtacaaggcttaatcttcgctcacaagaacatcattgttcagtaccatccaggaaggctgttctcttgtgtgctggatgccatggcctgaatgttggtgtccctgcaaaattgctgtgctgaaatccaactcctaaggtgatagcattaagaggtggggtctttgtggggagtgattaggtcatgagggctctgccctcattcatggcatcaatgcccgtgtaaaagaggcctgagagaacctatttgtctcttccaccatgtgagcacacatagagggcaccatctatgaggactgggccctcgccagacactgaatctgccggcaccttgatcttgaacttctcagcctccagaactgtgaggactacatttctgttgtttataaattgtccagcccaaataaagtattttcttatagcagcccaaacagaccaagacactggatatcaatgggcctgaagcaatggatgatccaatcactgaaaaattgccttagacatcgatagcaataactctatgctgtaaagagagaggagacagttaataatggatttttaattgctggaatctgagccttaggagacagaagaagaaaagagtataaaagaaggcagctggtcttgtgcttggggaaagaaaaggagaaaaaaaatctgtcattgcggaaacacttctacaaggtaaagcagtctcttaatcctgaggctggaactcaaaaataaagacaaaacattgagcaatacctcaacactctcgtcattcctgttaataggcttataataaatccagctggaccagcccaaagattattcttccagaaagagcagagcagagctgcacatggaaataagccctctatcttctgatacctcagtctccacatcactctaaaattagcctttaagtccttcctgtaaaagtggtatgatttccatgataacaaatgataaaacaatccacctttgtaaaaacaacaacaaccaaaaacaattacaaccaccattttgttagcctttcattaaaaatttgaatttaagagacttaaagccagaacaatgctgagagcctacttgtactctagtggaaacttgttggtaacagacccttatttgatatttcaagtaaaatgtagcttgaaatcaagctgaggggagacactacaaaagcaaaagtcagaaagcttggagcttcatggttccaaaagccaactcagcctgcatcacagtttggtccttacactatgaactgtgaattgtgtatggacatgtagaagctgggtcagaaatattttaaatcacaagttctggctgcttattggaaatattgctaaagaagttgtattcatctgctcaagtagtcacaccaaaataccgtagactgtgtggcttaagagaaacttatttctcactattctggaggctgaaagtataagatcaaggttctggctgattcagtttctggtgagggctctcttcctggcttgcaagtggccatcttcttactgagttctcacatggcagagacagagaaataagtctttctattcctcttcttaaaaggctaccaatcctatcagactagggccccacccttataaccacatttaaccttcattacctcctaaaagccctatctccaaatacagtcacactggggtctagggcttcaacctatgaatttgagttggggggacatatatcaagactgactactcgtagattattttagccctgcatgtttaatcatatttgtagatagcactgttgaaaaatacagaaaaattatgataatgagttacattttacttgaaatagcttagaatcttagcaagtcctttttgatataaattgtggaggggtcagtcacttaggtctatttcagagagaaactttctaagaaattctctaaataagattctttggtaacaaagtaaaatgttacctgacttctcatcccagtatctcaattttttcctagggcaaaatctttttcccttgaagactggaaatattatccatgttgtcctccggaatattttcaatgacttgtgccctgccagctctagcttttgaagggtctacactcatcatcaacaggtagactggtttttacaaatgtttttaccataacttcatttcctgtttcaaatgtgaaatggatcaaaaatgagaagagtagtgacatagtaaaattgataggacccatttcagaatgtcatttagacactctgggaactattcttttctcaccatgaggccacttgatgttaatgtgagtcgtgggaacaatttaagcattcaaaatccttgtaaatttaaagagaaactttctcatcttaacacatttgaaaagagaaaacacataaaatataatcgatttggagtataattttaagttcaattattattgcaaacatatgtgtataaatcagttcttcacaaccctccacaattccccttggtgcattcctcaaaataacagcatctggggtttttgttttgttttgtttttgcttttgtttttgtctcaagctcgcttgtattgttataaacatttttactttgttggactgaaagaaagaaaacatcctctgagaactatttttgtcgttgacaaataagaaaagggattcagtaaagtaacaaccataaaaaatcagtatattttctaaaaaagatttattataatgtcttctgcaatatgaagaccccttttagagtgtactacttatgctgtggtaagaaggtttattttgtaattaagcagcaaacccttcaatgttttgtgaggtggcaattttatagatctccttttcaatcaaacaactcagaaataatttctagttctttaagacacacaaagcaagatcatattttccacattttgatgtttataaatatcttgaatcaggataaaaattcatgactaactcatatccccagagtgtagtcttggttacaataataccacatactcatctccacttaaatatttcattatagatgacgtgaagttaaaaatatatcaaatgcaaaaggatggagaaaaaattcggaagggtaactatgcaagtctgaaactggggagaagtatttgatttgaagaagatgaggattatctgtgagatgactgtagatgcatgaaatctttttaactttccttggaaatagctaggctcttctaccagctttcagagctcctaaaactcaaggcaatgatccaatttaccatttcctaggtcttgttctagccaagacaaaagaaaaaaaaatgtgtctagaacatgaattaagatttaggaatttggctgggtgcagtggctcacacctgtaatcccagcactttgggaggccaaggcgggtggatcacctgaggtctggagttcaagaccagactggccaacatggcagaaacaccatctctactgaaaaatacaaaaacttagccaggcatggtggctggcgcctgtaatcccagctactcaggaggctgaggccaggagaattgcttgaacccaggggatggaggttgcagggagccgagctcatgccactgcactccagcctgggtgacagagtgagattccatctcaaaaaaaaaaattaggaataacaaattataaatatagtaaaatagaattgctgaaattctacagatacatgaactcaacagggtgtcaccaattatgagctgatttccaagttgattgtttggaaacaatttcccacagcaataacaatacatgtggaatttaaatttcaacccacaagatatatacattgtgttattaacagttagtagagcctgatcatcacgtgtgccattgttttatgggaaaacaaatttcacgtttcaattcccagatgcttcatgagcacctctttccatagcccactttttagtgagaataaactcttcttttctccagcctcaaaggaaatccgaatcctaaggcatcattaaaacaggatcccaaatctccatagcagaggagagatgagacactgaagcagtttaaagatcgggttttcaatgcgtgacatataactgtccattttcaggctggaaaaatgaatggctttctaggaggcatactgttcaactcacctttacaactttcaatcactgtggctgaaatagagtcatgaaagacaagatgttgataatacttacaagagaaagaagaaataaaatccctactttacgtctacttcctgtaaccagatctgaaaacctcagtgacctctgtggattaagctgtatttataattgtggaaattagacacggtgatgaaacactggttcttccattttccagaggctgttttaacaccacatgagtggggtgtctaatttttctgacctttggttattttattcatacaagccatgctcaccaaatgccttactgtgttaactagaatggcttcagttaaatagcaacagtggagaaaaaaataaattaatgcctcttctcagcagtgacctgacattacacttcctgccttttctaaactctcctgtaaaatatatacaatattaaaatttaaaatcctgacatttataattcttctagtaatttgtttctttcttctggcagcttaatcactgcgggcctggattttctcacttgtaaaataaaggaattatgtcaaataatatccgagggttttttaaaataaaaatgtccataatactacttaagtttatactgggattgaacaaatatgtaaatataatgtggacaatgaaagttgggtttttcacttttggagaaaaaaagttacaaataaggaaaggggggagaatagaatgaactgtgtggtatggtattaaaactaaaggtattagtatgaattcatggtttatgtatatatatatgtgtatgtgtgtatgtgtatacatatatacacatgtaaatatatgtgtatatatgtgtatagatgtatatgtgtatacatatgtatgtatgtgtatatatacgtatatttacatatgtaaatatacgtgtatatatgtgtatatgtgtatacatatgtatatatgtgtatacatatgtaaatatatgtatgtaagtatatatatatatggatagacaaagatatataggtatgtgcttatgcacagattaatatacaaacatatttcctagctctgtctgctgaaaaaacctagaaacgacaaactggtagcaattagcatacctagagccaagatattggttctaaatatgattctctgataaaaagaataacaacttcttggagaaattgttgatttagggctctggcagggaagatataagataagcccagaacatcttgtggtgccaaaaaataaagacatgtttgaaaaatgatagagccatgtcagaagaacagaggagccaatttgtaagaattcccaatggccaaagctggaacaatttgagtgacaaaataaataatgataatatcagattataacccatgaaataaactaaatatctaaaagtctatacttatatcaatcaatcaatagggaagaaaaagatactcctccttacaatagaacttcatttcacagacataaaagaaatgagggacacataaaatgaccattaggcaaacacaagaacaaccccagaatgataaaattattgggcaaaaccatgaaaagaaaatgagatgaatatttgcatagcattaaagtatcttcccacaagatatttattaattgaaaagagaacatcctaattttactctggagaaacacagcaaacaccacctttatatagtattgaaagttaacatcatcagttataagacagcagcatcgtgtatgtcttggtgtgttacactgaggacacagtatcattcctgcattcataccagaaatgcatcatctcaatctaatgctgagaaaataacacacaaatgcaaaataagggacagtttacaaaatgacccaggagcactcttcaaaagtatcaaggccatgaaaacacaaggagagagaaattgtcacaggtgaaaggagattaggagatatgacaattaaataccatatagtccaggatccaaacagacactagtgaaaaaactggtgaaatgtgaaggtttgtgaagtaattaattgtgtctcatcaatattgatttcctcctttccataattgtgttgtggttatataggatgtctatgtaagtggaaggtaggtgaagatagacaggaattctctggaatatttttgcaactgttttctaagcctaaaattatttcaattttaaaagcgcaaaaaggattgagttgtaataatttgcagattttaatcaataacatttatttcacaagtactgatagaatgacttccctctgctaggcactgtactaagagacatctaaagatgcacaagacacacacacacacacacacacacacacacacacacacacacacacactcttccagttattttaagcaattcttaatcactaatattaagacaagcattcttatttttccagaaatgagaaccaaacatctctaattataatggtggtcttatgacaagagtaattaagattaaacatacatcaaattatctataaatttgatgtaattccaactttaaaatcctcaccaaattatataggccttcataaatggattctgaagttcatttggaagataaaatatgttaagaatagctaaaggaattttaataactggccctaggaaatatcagagcatacttgaaatctatagctattaaaatggtaacataggagcacaagcagacatcaatggaacatgatgaagggccagaaacagacttatctctctatgataatttagtagaggatattgatgataatttcatctagtgaagaaacagtttgctattcaataaatggtattggcataatttgaatcctttgggaaaaaattaaggtcatttatttactcaacagatatttaaatgctcacatgttttggaaacaggaatttgatctctaaccaactccatgtacaaaaataaatatccaatatcataaagagctaagtcattttttaatctataaaatgtattaagataaaacacggaagaactttttttttaaataattttaacttttattttagattctgggggttcatgcacagatttcttacctgggtatattgtgtgatgctgagctttggagttcaactgatttcatcacccaggtaatgagcatagtatccaacagttagtttttcaaccctttcccccaccttccctcctctattggtccccagtgtctattgttgtcatcgttatgtccccaagtactcaatgtttagctcccatttataagtgagagcatgcagtattttgttttcttttcctggcttagcttgcttaggataatggcctccagctgcatccatgttgctgcaaaggacattatgtcattcatttttcatggctgcatagtattccatagtgtctattaccacattttctttatccagtccaccactgatgggtatctacattgattccacgtttttgctattataaatagtgctgtaacgaacatatgagtgtgtatgtctttttggtagaacaaattattttcttttggatatatactcagtaatgggaatgctgggtagaatgatagtttcatttcaagttctttgagtaatctccaaactgcttttcatggtggctgaattaatttacattctcaccaacagtgtataagagtccccttttctctgcagccgttccagcattgttgttttctgactttttaataatagctagaggatagtttttatcatcctgagttgggaaagcgctttctacctagcattaaaaaatctgcaaggtctaaggagaaaaactgaaaaatgtaatttcataaaattttaaatgtttacagataaaatataccataaacaaattagaagatgtggaacaggctgacagcatttaaatgtgtataaaagatcgattagaatataaaataaataaaaagtttctataaataaaaagacagaaaaatggggaaagaatataaactggcaatttatcaaaaaaaagtcaacgggaaatgtatatactcaacctcttaataaagaaataaatacaaattaaaacactactgagatgctttcaccaaattggcaaaagtgtttgaagattattcctactcagggttgattgtatgaacatgaaatcaaaaactcagattgttgctgtagatgagatgcacataacttttgaccaaagaacttgatttctatgaacctaccaaaatactcaaatgtgtacaaaagaagcacgtacaggaaaggtcatttgaactgtttgtaacagcaaattactggaaacagcattaatattccttaaaaggagaatggttaataaaaagctacagaacatccaggcattgaaatacgtttcagttattaaaaaaagaatgagatagtgttacatgtatagatatggaaagatcttcaatatattttgctgtgtgtgtaacaaacaagttgcatatcagttgatagagtatgattacatacatatatttgcatgcatacatagatacagacaaaggagaatttacatactttaatttagatttgtttcatgtaattcttggtttgaatttttacatggggaatatattcatttatgatatatggaactaaaaatataaagtaaaaaataagcttctgtatgatttagagcagctttatgtaaatatagctgttcggttcaacttttaagatcaaccttaaaagggggaaaaatgggctaaaagtagaatatgcaaccaaaaatatgtattccttggtttaatctaggattaaactaatcttagatttaatctaagattaaattaaggaaaaggttcttttggtaaagcttgaaaatatgaatgaacacagttcattgagctatataggtcaggtaaattgatggaaggaatatctatataattttatgttggaaggcaaaatagggaggaagaggccagtggtccacacagctcccattaatagcctagctgttcacatggtgtgttctgtggactcacacagccacactcctagagttcactaaattggaatggtaaaagcaaaacaaatttaattatgtgaatgcatttcttgtacacatggaagtaaatattagactaaattaagaagcaagatatcagttctacaaagccaggtgtaaataaactattaagtaacatgaaaattagagagtaagactgcagaaccaacacaaaactagaggaaatacttgagaagcagtggatgatgatgaagctatgatcgcaccatttaaaagcaagcctttgaattccataagaaaacccatggggggaagtctagaaacagaattctccagccatccacccattgctcaaaccagaaactggggatcatattttctatttcccttccctctccctcacatcttatccaataattcaacttccaaaacatctctccagtcattctactgagttctaccttccatgcttggtcccaccactgacacgtctcaccaggacaaccacaatgacctcccaaccttctctcagccttcacttctttccccacggcccatccacataacaaccacagcgatcttttaaaaatttaaatagccttgtccatttctgtttaagggaattgtgctgccttgaccctcaagacagcagttctcgcccagacacactctcattctccaccttcttcgtcagttgctctccttactttccaagccagcgctgcttcctttccctgtccgcttccctcctcagagacttcatgctcactttccccagatttttactgcattgattccttctcatcattcatgcctcaatttaaatatttatcagtgactgcttccctgatcacacaatctaaaatagccccatttccatcattttgatccctgatctttccctttatagcacttacagacatgtataattatatattcacttgagtgtatgcttgtttaatgacccctcccccaacccccactttcccgtatagactgaagggaggcaggaaccgtgcctgtctcgtcttctattatgttcccagtgctgagccttgtatctggcatgcagtaggtgttcaatgaatgaatgagtaaacaagccagaataatcggacccagaaatatgctgaagggatataaatgcctagcaagaagaaggttagtaggaataactattatttgtgtgatttcaagatactaatgatgatatagggatagatatagggcccttttgggaagccaaatggctgcacaaacagtgtggtaggaacacagtgtggccactgtgtctgcgctgcactgattggatctaaggataattttgtaaacgcacccatggtgattagcaattggctcatactgaataaactcctgacagatttatgtgtgcactgcaatgccaacttattaattcataataataatataacaagtcaacatgcagctcaatcaccacctataggagagagacaggtagctaaattatatccaaatgattaactgctcagaaaagattcctggtcacagattactatgcagctgagataccatcaccttagtctaagctaccgttgtcttatgtctggtttcttgcaacagcctcctgactgttctctgcactgcctgcctctcaaatccataaggcacccagcaacaaaagtgttccttttaaaacgcaaatccaatcaggtccctcctctattcaaaacccttcagtagctccccattatatgagaaggagctccagccctgacttgtggtttgtaaggtttggtatgatcaggcccctgcctcctctccagcctcatcaagtgcccctctccccagcactccagactccccaacacagaggtgtgtgttcagatttgagagtctgactatagaaatgggcaatggctagatcataaataaaaacagaattctgaccctcaacctgcagcaaccagcccaggaagccagcccattatccagaggaaccaaccaaggaagccagcctgctctctagaagctagacttgtaggaagccagaccactgtctctagcaactgatccaggaagacagaaaagaacacctcaataacaggaccaaagtggccaggacttgactgatgagtaactgacagcttccctaatttttggccctacttccaacagaagaacaaccagagaaagccaagtatgcacctgatgccccacttccagtgagccgcctccagcttcccacgccaacagcttccaatcagcacactttcggagccttcccttttctccacgatgaaagcttccccactcctctgactgcctttgagcctctgccaaaactcaagtgatggtagccgactccctgctaccgcaagcttggaataaacagcctttgcttttctcatctgctttgtcttcgtttatttccacaagatccttcacagtgagaagctgcttcctcccttggagcctttctaaccctgcaccctctgcctggaatgcttcctccaccctccacgtggtcaaacctctccctgttttccagatttcaacttgtgaattgaagacaccttctctaaccactctgtaaccactcccttctcagcctcttttttggttcccttacagtgcgtgccacaacttgcaatcatttcgtttatttttttggtttgcctcttttctacctatcatcaccactagaatgaaagcttcatgagggtagggcttcacttccgttcaatcggatcctgaggacctagaatagaaccttacaaacagcaggtactgcagaactatgttgaaagattgacagggtgaataaatgattgcatgcctaaggtaaatgcagactcagtggaaaaaacaattgtggccagcaacccattgaaaaaaccggattttgaatgagtccacagtgctgcagatttgctgatctcctttgtggaccgggtgcagggttgggagttggcttcctgttgatcccctgtgatatacaacgctccatatcagagcagtggatgacgaacagacatggccccaggatgcagggctgagtctcaaagtctcataaagtctccaaactgagcatttgggttacacaagttctctggccatcaaatgttagccctccaggccttcccagaatccagacctcaatgtcagcttcatctatccaaactgctgagagaagaggtggaatttcacggcttaataagccacaggccttgtccttgaaggacttatcaaatctaatcattggccacaatttctttgcagccaagtgcatcagtcagggctcaccagagaaatagaaccaacaggatatacactaagagatttaatttcaggaattgcctcacacaattgggagggctggcaggttcaaaatatgcagggtaggcccgaatgttggaagctcagacagaatttctatgttagagtcttaggcagaattccttcctctctaggaagcctcatttttcctcttcaggccttcaaccaattaggtaaggcccacccacgttactgagagcaatctcccttacacagagtcacctgattgtagatatgaaccacttctgcaaaataattttcataggccgggtgcagtggttcatgcctgtaatcccagcactttgggaggcagaggagggccgatcacctgaggtcagttgtttgagaccagcctggccaacatggtgaaaccccatctccactaaaagtacaagaaaaaaaaattagctgggtgtggtggagcatacctgtaatcccagctactcgggaggctgaggcaggagaatcgcttgaacccaggaggcggagattgcagtgagctgagatcgcactactgcactccagcctgggcgacaagagtgaaactccatctcaaaataataataattttcatagaaggatctagattagtgtttgccccaaaagctaggccctatagcctagccaaggagacacataaaattgatcatcacatcaaggtttcaatgttaaatccctcattttttttaagtgagtaagattatgacgttctctgcttaacaccctctggggctggccatcactctcagtttaaatttgcagtcccctatcacgactggaaatggcacagcctgatgtgactcagaaggcacctctctggcctgatctcctgctgccatacttgtcactattgtacagggagcacctcagctgtcccagtcaccatcctgcctcaaagccttgcaagtttcctccctttgcctggatgtcttctctctatgcctatggctaactccttctagaattcaagcctcagcttaaatgtttcctcccttaaatgagggttagctactatgctgcataaagtgactctctttaactcttgatcacatcacctgctgtctccttcatcaccacatcactatttgtaaccactgttcatataacttgcctaaaatttaattggtgattctcaacccggggcaagtttggcctcaggtgacatttggcaatgtctggagactttttaaaaaacatactatatttattcatttatttattaaatatgaattttattttctagagcagttttaagtttttagcaaaattaagcagagggtacagagagttcctgtagaccctctgcccccacacatgctcagtgcccaccattttcagcatcccccacctgcgtggtacattttttttacaatcaatgagcctgtgatgacacatcattatcacccagagtcaacagttttcatcaaagtttcctcctggttttgtacattctgtgttttttgacgagtctaatgacatgtatctagcattgtagtatcatacagaatagtttcactgccctaagaagaatcctatgtggtccacccattcatccttctctcccccaccaacctctggtaatgacagaaatttttactgtcgccatagttttgctttttcagaatgtcatggatttggaatcatacagtatgcagccatttccaattggtttctgtgatggttaattttagccgtcaactcaactggattaaggggtactcagatagctgataaagcattatttctgggtatgtctgtgaagatgtttccagaagaggttggcatttgagtcagtagactaagggagatctgccctcaccaatgtgggcagtgctcagataggacaagcaggcagagggaaggtgaattctctctctctctctctctctgtctctcctggagctggggcaccctcctcctgcccttggacatcagaattccaggttctatagtctttagacttaaggacttgcatcagcaatccttcagttttcaggcctttggcctctaacagagttatgccatcaaactccttggttctgaggcctttggacctggactgagccatgctatcagcttccctggttctccagcttataaatggcctattgtgggatttctcagtcaccataattatgcaagccaattttcatagtaaatcccctattatctatctagctgtctgtctgtctatctgtctatcccattcatataatctattatctatatattcatccatctatccatcccatccatcccatccatcgaatctatctatctatctctaattcatctaatctatttatctatctatgtatctaatcaatctaatctatctaatctatctattccattcatctaatctattacctatctatctatctaatctatctattccattcatctaatctattatctatctacctatctaactatctcatccatcgaatctattatcgatctatctcctgtttgttgtctctctggagaaccctaatacagcttctgtcacttagtaatatgcatttaagtttctttcatgtcttttagtgacttgatgccttatttctatttagctgtgaataatactccattgtctggttgtaccacagttcatttatcctgaaccaaagaacatctaagttgcttccaagttttaacaattatgtataaagctgctagaagcatcctatgcaggtttttgtgtagacatgttttcaactcacttgggtgaatatcaaggagtgtgatatagtttggatgtctgtccgctctgactctcatgttgaaatgtgatcttgagatcagacctagtgggaggttttgggtcatgggggtggatccctcatgaatggcttggtgtcctccccagggtaatgagtgtggagtcctgaacagcaggtgaggaacgtgtaagaacgtggagtgattcgcagagtcaaatgaagcctgagagccaaccaatgtatttcacaatgtagaggccactgatgacctcagtaagagggggctggggatgaaatcctatttggatggtatcttagtctgttttgtgttgttacaacagaataccacagactgggggatttctaaagaatttatttctcacagttttggaggctggaaagttcagtatcaatgtactggcatctggtgagggccttcttgctgcatcatcctatggtggaaggcaagagggtgagagcaggtgagagagagagattgaacttgcagccccaagcccttttatgattggcattaagccattcataaggatggagccctcatgacttacacacttccctttaggcctcacctctcagtactgttgcattgagattgagtttcctgcacatgcttgtggagagacacatttaaatgacaacagacaggttaaagagggaactaggggaggaatgaaagacagagagtaataataactcaaagagttttgctgccaaagggagcaaacaaatggggcaagtgatgtgagtggacgtcaagagaaggcttttgttaggcaacagaaataacgcaaaataacccagaagaagggggaaacgatggaggagagagaagggagagaactgcaggagtagatcagagcagatgggatttagtgtaggagaagaaaggagcttggctagctcagccatggtaaagggcagtcacaacatgtggaaatgtgctgtctatgaattctacatgctcacatgacagactgcaaaagagctgactgcctgcatggggccagaacagtcagaagcaaatgttactgtggaccttgtcccttggacatcaaatgctcctctgtcaatatggtcagggatccgttctgtaggtgcccttttccttcacaaggaggcagagaccacatctctttctacctcggctcccctagacagacagtggcatttgaaacaatcaccttgtccctgtctgtgtttggcttctaactgctctattccatttccatgctgccaagctcctgccctttgccttcatctcatattttggtctttttctggcctcttagaattggtacttggattctggtttctggctggatttcagtattcactactaacttggttaggactttcccccagagctcctggctgccttgagctgcatgccccgctctatttccagctctttgaggcccagtccctgaccctggctcgcctggctaatgccctaggctggatcctccatcagccctcaaaaggaaattgatgtgtccagagacagctcaagttttgtggtgagacacaaattcaaaatagcaaagtgaattaccattgatacatatttatatatgaatttttgcataatgcagcccagattcatatgtcaataatagctggaagtatcctattgatgcaacaaatcatatgagatgctttaataggtagaagtctaagatagccccccaaatttcctttccctccatcctccatatgtacctcctatgtaatcctgtgaatgtgatggaatttactcctgtgattaggttaggatatgtgacgcagttgcctttaagaagggaaattgtccaagtggcattgacctagtcacataagtcctttaaaaaagagtgttctccagtgtcctctcagaagaagccagagattcaaaacacaggaaggattcatggacacgctgttgctggtttagagatggagggggtcacatctcaagacagcctgtgtgtgaccaccagctgacaacagcaaggaaatgagaacctcagtccaacaactacaaggaattgaattctgtcaacaacaagaacaagcttggaaggggatttttacccaaagcctacagatgagaagacaatgtgcctgacatctcgatttcggccttgggaggccctgagtagagaatctcattatgttgtgctatactttccacctgaagagctgtgagctaataaatgggtgttgtttcgtattagtattagaaatggtgttgttctgtattagggttctctagagggacagaactaataggatatatatatatgatatatatatgatatatgatatcctgtgattaggttaggatatgtgacacatttgcctttaagaagggaaattgtccaagtggcattgacctagtcacataagtcctttaaaaaagagtgttctccagtgtcctctcagaagaagccagagattcaaaacacaggaagtgatatcatatatatgatatcatatatatatatcatatatatatatgggagtttattaagtattaactcacacaataactaggtcccgtaataggctatctgcaagcctgaggagcaaggagagccagtccgagtctcaaaactgaagaacttggagtctgatgtttgagggcaggaagtatctagcaccagagaaagatgtaggctgggaggcctactcgttgggtcctgctcctcgttgggtcatccatgactcaccactttccacacaaggagcagactatcccctcacctgaaaccatcctctccccactttcctgaccccagggccaggatgatatttcctgaactctgaatcccagtctggatccagcacactgggttcccatttgtctggactctggagaggaggttgggactgttcgaggcatacttttatggaaggaaagaattaaatgtatgtggtagcccagcaaggccaggaattcctgcttcgatctttcaatcctctcctttttttttttttttttttttgagacagagtcccactttgttgctcaggctggagtgcagtggcttgatctcgactcactgcaacctccatcccccaggttcaagcgactctcctgcctcagcctcccgagtagctggaattacaggcacctgccaccacgcccaactaaatttttagtattttcaacagagatggggtttcaccatattggccaggctggccttgaactcctgacctcaggtgatccacccgcctcagcttcccaaaatgctgggattacaggcgtgagccatcacacctggccacctcttcctttctttagaggaattaatcctaataacattggtgtgacagcctgaaatggtgatgctgaatgcttcaaattcatatttttttctcttcatctcgggtatctataaaataacatagaaattcttagagttccagatctaaaactagatccttggatattcggaaaaccctgaaactacaggatctttttcaatcccttgagctgtgctagaagttagtgggggaagaattggatctacaggctctaagctcagcactcgtagtgctgatatgtggctatggtgcagcatgatatttgcttcagccagacccagcaaggtactgagaggagcaggcagaggaagaggaaacaccccacagtccctaaggggtcagggttctatgacttcagactttcttccagatctgacattcagtgggtgagtaagagaggtcaggactgggtgaaggccaggcaggagaaacgagactagaagtaacatgccaaactgagatccaatgctgagagctactgagttggcttattggggtccaacaacaagtggataggacagctgggaagattgaggaccacagaacagttgaggaaaaccacagaaagttacaatggggaacttgtatttactgattttctatatcttatcaggtgtcaccacctgccatgcattttcttctcaactgccttgcaaaattaggtactatcatctccactttacaaatgcagaaattgagaagactctgaatggataaatgacttatcttttcatacctagtgaagtgacagtgttagaattagaatttaagtgactttgattgacatcacccgccgtgttatttcctgatggttccttgcttatttaacagaggcactgatgactccatgacgagtaaaccaagtctattgaatgaaaatgtcccgagctcctactgcataccaggcactatacagaagctatctgcttctctttgccttgtaatccatgatccaggggaacacattgtagagtaatagcaaggggaagcagggatttctgtgaactctactttctatggtagcagcaatcacgacatacacatcaggcttactgaatgcctactatgcttcaggcgctatgctggatatcagaaatgccataggcaccaaaacagtcctgttgcacacctatgctaattcctttgctgttactgcactgcaaaagcctttgcaaacttcaagaatggtcgtaaatagtctgaccctcttaagtgagacatcctaaggaattgttctcatctaaaagtgaaagtagaccagctgacccaaatggaatcagcagaaggaagccaagagatttccagtaaatacatgggagagtttgggcaagatccaagcccaaaaagtccgtctcattgttatctaaagaaagcagggaaagaatatgattgtaactaggaaagctggagtctaatgagtttatcccatctgggaaaatgtattaagagaagatggtctgattggagctttaaaaagggatattatagtacagattgagaatttattagtgttaatctaatactgccaactgaagccatatattaaaatcattacagaggtatgggctgctggaagacaagggtgattttttttttctggttcatatgggtcttaagattatcccaccctctttatttctaattccatctacataagcagtcttccaattaatatcttgactttgggtataagaaactggggtctgggatgggcacggtggctcacgcctgtaatcccagcactttgggaggctgaggcgggtggatcacctgagatcgggagttcgagaccacactgaccaacatggagaaaccccgtctctactaaaaatacaaaaaattagccgggcgtggtggtgcatgcctgtaatcccagctactcaggaggctgaggcaggagaatctcttgaatctgggaggcggaggttgcagtgagccaagatcgcaccattgcactccagcctgggcaacgagagtgaaactccatctcaaaaaaaaaaaaagaaaaattggagcctggattccagacgaattattaatttgtaagtctaccgtatacatcagtcttttataaatttgattaacctaagtcagtttcagaaaagatgtataatcacctaggaaaaatcctacactcctacagtccaatattactgacagtctagaggattgcaggtcatttctcagggtctggtccttagatttgaaagaactgggaagtaaaaaaattggattttgaaactaagaaccaggcctgagaaatgggggccacgcccaggcattaccatctcaagagacacttttgagagattgttctgtacttctctgatatcatcgtgatcttgctaatggcaaaaatccctcagagaaaattctttaaaagtgagaatattagtaaataatgggtcatgcctgcaatttacttccttcttagtcacttaagtgttctacaggattgcgggtcttctcatcctgggacctacagctagaatacaactcctggggctttactggccagggctgctttggtagttctgtacgttattctgatttaatttatatgacatcttttttgtgggggaggctgaggacagagtctcgctctgtcactcaggctggagtgcagtggcgtaatctcggctcactgcaacctccacctcctgggttcaagtgattcttgtgcctcggcctccagagtagctgggattacaggcatgcactaccatgcctggctaatttttgtatttttaatagagacgggcttttaccatgttggccaggctggacttgaactcctggcctcaagtgatccacctgccttggcctcccaaagtgttgggattataggcatgagccaccgcgcctggcctgacatcttcttttgtacaataatctttctttgtaaggagttggctttccacattcctgaatttgcagtcggaaaattgaatctatcctgaatgtgaatgctgaccgaatggagagttacctgtctcaatctgcaaaccctctgaattatatttgtttatttgtttgtttgtttaacttttactggtttgttataaaggaattacaaaggatgcagatgaagaggtgcatagggtaaggtatgtgggaaggggcgcagggcctccatgccttccctggacttgccatcttccaggaacctccacatgttcagttatccagaagctcctgaattttgtttttcttgtatcctcctgactttattggaaacttactgtttaagaggcagcatttatattaaaaacaactgctttgattttctgtggcaggcagtgaagctctttcactggctggagtcttcaattgcgtgccccaaatgaatcattttaatggcattttgggggatgtggattctacacacaggattatctgaaatgtcgtccagattccatgttgaagcagttgaccacaaaatgagagcagtgcttacaatagactgtggattccatttgataaatataaagtccaaatgatggctgatgaagcttatcaacaatatggcttttttgttttgttttgttttgtttttgagacagggtctggctctgtcacccaggctagagtgcagagatctcagctctctgcaacctgtgcctcctgggctcaagtgatcc

SEQ ID NO: 496 - DNA, 20001 bp, Homo sapiens
gcaggcttgatttctttagaagactccagcggagaactgtgtctccttgcttctggtgggtattggcaatccttggagttccttggcttgtaggcacatcgcttcaatctctgcttctgctttcacgtggggctcctccctgtatgtgtctgtgttgcctccttttctgactctcataagaacacttgttattggatatagagccctccctaatccaggatggtctcatcttgagatctttatcttggttatgtctacaaagacccttattccaaataaagtcacattttgagattttgggtggacatgtgttttgatgtgccactattcaacacactaccaaagaggtcactcatcacgtggtttcagagatcaagaggagtgagaatggcatccctgtgaaggggtggtttcttgtggggcatgaaagcttatgcaggataggagagtatctatgctagaagtcacccagcataaatgtcagaccccaagtggggtgatgaggcgagatgagagattggttacatatggtagactgatccaataggcaagtaagtatattgagggtgagaggagccaagtttctgtcatagaagcaaattacaaatataaaaaaggagaaaattatggagttgaaggtactggtgtgaacttgtaatttgtaataaatgagctatattaatacatggagatgtaaatgtatgtgggtgtatgtgtgttttataatacctagctctgttcactgaaataggctggcaacatatccactgcgatagcaactagcacatttagcatccatatcttggcttctaaatactggtcttcaccagaaagagagagtttttcttgggaaaatgaccagatttcatagagggagtacattgtatagagggagtacaatatcaagcattttataccagaaagtaaggaagtcctttaaaaaaataatggagtcgtgtcaaaagggcgcaaaaatcatcctgaagaagctcccataagccaaattgggaataatttgaccatcaaagtaaacgatagtaatgtattaccgctcattaaagtacaaaaccgttaagtccatcattatcaaagtaagtgagtaaattgaaaatttggaatgaatgagatatttacatactttcaaatctatcccccacaaaatatttactaatcacaagggggaaaatgaatacattttgaatggagaaacatgccgatgccacctgaactgagtgatcaaagtgaacatcgtcagtgatagcataaatcaaaattacttgtcacccacctgatagaatgcaatgagaaacatctgtgatattcctgtcagatgcatcatctgaatcttatcatgagaaagcacaataaagccaaattgaggcatgttctaccgaataaatggatggtaattttcaaaagtcttagagttttgaaagccagggaaagactaatgaactaatgaaggcatctagagagacatgataactaattgcaatgtgtgtttctgaactggacacttattttgacaatcaaatctgaaaattagagagtagtaatatctcaacatatcaattgcttaataaatacccagagcagagtaagcactcagtttaactatgatgatgacaatgatgacactgacaatgattactgaaggaccgcatgaaaaaatacacctagcaggggtggggggagcggggagggatagcattaggagatatacctaatgtaaatgacaagttaatgggtgcagcacaccaacatggcacatgtatacatatgtaacaaacctgcacgttgtgcacatgtaccctagaacttaaagtataataaatatatatatatatatattaaaaaaaaagaaaaaatacacctatcatctatctactcaatatcctggaattctggaacaggagtgttctggattcatttgcaaaaaaactggttccccaggtctaatcaaattaaattgagaggtaaatttaaattatatgtattttttatccaacagagaaataaaaagcactttgccaaacagttaaacacttgcgacccagataactaaactcttcagacctaggaattctaaaattaaattgctttcatgaaagtaaaaaattcagtcttcttccaacaaccaaagaggaatgaatatgaaaagagaggctgaattgtcccaacactgaagagttgggagcaattcattgaattgtagaactggaagagatagtgtaagtgtgccaggatctttctataatgctagtttggaagactgatccctcattttccaagggaaaaataaatcccagtgtcatagctgcattcctgtgtagatctttgcttaggttttctaaaattcagagctcaaagtatatcatcctttgtatttaaggaagtcttatgggtatcctcacttactcatggtgcaataatattcctgcagattctacatctccatccatgggccactgtttcagcaacctcagccagtgcaacacaacctcagccaagaagagtatgcagagaaaggagtcccctacctgccacaaaactgttgtctgaaaactgtctcatattgtctcaagttgtcattcattgtgaattagacctgtttaacatgtaatctgcaacatgcttcactgtctaattttccagagcccctcatataaggaactgtattattggtataatcatcatggtgaagaagttggtatgtgggggagagatgacagaaacagagagtaagtcagagctggctgcctgacagataaaaaggaaatgaccaaaaaaaaaaaaaaagacacagaagaatactttgttgtccacacagaaaagggaagtgtaggtaagacagcagtagactaagattcttaagactcaagttctagtcttatttattagctatgggaggccttgagggagttctagaattaagtgatctctctttataaaataggaacagtaataacttcctggctaactccctggctgtctcacaatgctgtagtagtaagaaataattttataattaaagactattttagggctgattacatttttgggcagtggctcatacatgtaatttcaacattttgggaggccaaggtgggcggattgcttgagcccaggaattcaagaccaggctgggcaacacagaccttgtcactacaaaagaaaaaaacattagctaggcgtggtgatgtatgcctgtggtcccagctactcaggaagctgagacaggaggatcacctgagcctgggaggtcgaggctacagtgagccatgatcacactactgcactccagcctgggaaacagagtgagactctgtctcaaaaaaaaaaaaaaaggaatattttacacttcaaggttctatacaaatgtaaaatatcattctattacttatttataatgctgattattctttaaatgactttaaaatgttaatctctgcttgagcctacggagaagtatgtaacaaatttgtgaaggattggcattaaacatagtcaaaataaaacatagaaattatggtaaataatttaactggtaaaataatctaagtggtagttctcaggtaagtggaaattcgattagctgattgtttaggattcttggttataagtgacagagacctgactaaaagtacatgaagcacataactgagaaggttgtggtatggctcagcagaaatgggaaaatcttgggactggttcgtgttttatttacattatctttgttcccaggcagtctctgcatgtaagtggcaaagatgactgtctgaaaatatatacctacttttttaaagggctatctcaagccattctggagaagcaccaaaagccactttgcttatactgggagaatagtttgctttccctaatttgtgatgagtgaaacactgaacagagacatagaataatattctgtagttcagggttggtgtaatatggccagtgggcggaatctggtcctcagactgattttgcaaataatcttatagaaacacagcaacacccattcattacatgttgtttatggttgctttggggttacaatggcagagttgagtagttgtgacagagatcactaggctcaccacatctgagatatgtactgactgaccctgtacagaaagtttgctgctcttagaggaatgtgtgtttctagtgtcagcaataaacttcttggatttgttttgttttctcatctttacatgatagttgcagactagttgatccttgtgacctgtttttgaatgccactgtgtattctgtcagggccctctgattctgtttcttatggtgctgaatgcacaatttaatgccctggaatttccttctgtcttctgctaaactcatgcctcttcagatagttaaaatcctgttctaccttagaagtctccagagttattttcctaaattaagaagaactggctttgaagttactcattatgccacacacaatggttgaaaagagcatctcttatgtactgtgtatatttcagcatccactcagcttcttaggtagaaaaggaagagtcttccacagtgtattttatccatatttgggtcagaaactcttctttaccacggagcgtgatggaagaaagatatgggatggtaacagtaggccagggatgtaataatcacaaaatttgagatattttgtgactggtgactcacgcctgtgatcccagcattttgggaggccaaagcgggcggatcacctgaggtcaggagttcaagaccagcttggccaatgtagtgaaacctcatctctactaaaaaaatataaaaattagctgggtgtggtggtgcacacctgtaatcctagctactcaggaggctgaggcaggagaatagcttgaaccaaggaggtggaggttgcagtgagctgagattgtgccaccactgcattccagtctgggtgacagagcgagactctgtctcaaaaaaaaaaaaaaaaaaaatctagaaaaagatctccaagattcaatcatctaattatttcttttaaaaatgagaaaaatgactcctggtcagcttttaccttctttttccaactgtcttgacaatactttcatattgggcttttaaagtctcaagtaataggtttttaaaacctcagctgataaaagtataaaaataaagttaaaacatattaaagacaaaacccaagaatcagcttcctcttccttcattactcttgcatgggtgttggctctaatttctccatctagttaggcagtcctttgctttttattgcttgtttattgatgacatttgccatttgtagcaatagtaatagaatcatctatatatttgtggccttgttgaatgtagaaaaaggatagtggcattttctaattgtgtaaccctataacaccttgacgggggactacagttcatatgctggaccttttgtgtttgttcatggcgggtgggttgctttaatatacttagcacattgtcctaattgccatccttttggggagggctatatatccaagctaatatggtagcatttttgttttaacatagagctgacccaaggtagacgtaagtgttgttcatttttgcctaatactaataaaattacctaattgttgaagcttggagcttgaatctaggcattttatttcatttcaagtacaccctagtattttaaagcataaatatcctactatcctcaacaactttagaacaaaaataaatattttaacaagaaaaaagcatgccatgacaagctgtaacttagtaaagaaagacaaggaatggtctctatagaccgagaaaaaataggtcctcagatatatttataccaaaggaatgttatgaatgtaaaaaacagtttgactcccccccccccgccaaaaaaaaactccacaaccctatattttgttatcacaagactgttttagtgaataaaacagtatgaattggttttacctgtttccatttaatacttattaactttataatcgtatagcctgagggttttaacttcaagtacagcatgatgactataatagttttacacaaggcaaatgtgaaaaacagaagtaatttcttttaaaaagtgtgaaatatctaaaaggtatgacttcaatacatcaactcaggtgagacagacatgtaacttctttttccatgtttaaacctaatattgcttttgtgcctctgaaggctcggagtttccatgccttcttaggacatgccaccctctccacacctggatgtgttcaccaacccagaagctcttggaaccccatcatttggggtttttatggagtccccattaagtaggtatgactgattaaatcactggccattggtggttgactcaatctccagcctctcttccctctctgaaggtgaaggggtgggaaggtgaggctaagttccaaccctcggatcacagggttggttcctctgcaaccaggcttcatcgtgaaacaatacagggcccaccgagagtcaccccattagcaaactcagatgtgattgaaaggggcttattatgaatatcaaaagacatttctctttctcctattactcagacagttacaagggtttcagaagctcttgcaccaggaactgggaacaaagaccaaatatatatgtcttcttctattacaatgtcacaggtgtgacagagtaggtaaatggagtctcagagagtccccagagtattccatggagccacaaaatgaagaataaatggatggttctccccatgatcaaaagtggcctgaaaatacttgagaatgagtcataacttaaaaggctgtatagtagaaaagaatgcacagaggaccgaatgtaaaagaaggcaccccagtctcagctagtgtggatgcatgccagtgtagaaagatgctagtgtggctacattggtgcactgaagaccaaactcctgcatggccccacatccttgataccttagatctatatcatcccctaaaacttaggtgttatgacattcaggatatgctaccccatcattttttaggctgaaggaatttgagaaaacagaagcaggaatgtaattgcccagtgggttcttcctgccctgtgcacagacaaaaccagttcactgagaccatggtattgcagttaagaaagagtttaacaggaggctggccacatggaagaattacagttattacaaattagtctccctgaaggctcagaggtcagggtttttcatggatagttcggtgagcagtggattaggggtaagtgctgctgattggttggggatacaatcataggggtgtggaaaatggtccttgtgtgctgagtcacctctgggtgggaggccatgggacccattgagtcatgagtcacgaggctgggttgggtcagtgtgaaaaacatctcaaaagaccaatcttaggttcaaaataggtgatattacctgtaggagcaattgggaaagttataaattatatgacctcttggccccatgacttctgagcagtaagagatgatagaaactaaacctacattttatcagcactcaggcctcttccataatcctaatcttgtggcctttcgttagtcttataaaggtggtttggtaactgccctcaagcaaggaggggatcagttttagggaggtgctattatcatccttgcttcaaagttaagctgtaaactaaattcctcccataattagcttggcctacacccagaaatgagcaaagacagccagcctgtgatgttagaagcaagatggagttagtcatgttagatttctctcactgtcataatctttgcaagggaggttccaggaaggtcatcctacctttcccctcacccttctcatgtgacacaggtcataaagcctaggaaggattttccgacctttccctgaagcaggtcgtaagaccctcattggggaggtgccatttctagaccaagagaaaaggcacatccttatgtctgaagacacagggacacagagaagaatctgaacaaacaggtcttgctaagttccccccagtttgttttcattagatcatgcccctttattcaatgctgtttctccacaactatccatttcttcatcaagcctagcataaaaaatacaggtttcacggtttctttgggtcttcatttccttataaagtctcctgtaccatgtaaaacttaaataagtttctctgcttttctcttgttgattctgtcctttgttttataaccctcagacatgaacctagtgatgagtgaggggaagataatttattttcctctacagatgcaaaagggaaaagggaacaatccctaaacggaagttatgatccagggatcagaggctcaaaagcaagattaggtttaaatgtagaaaaatacattcctctttcattttagatatcccaaatgcccaaatcaacccagctatttctcagaagtctgtttcccctccaccctctgctcctctgtgtagtgaaactgtctcgtttgggagtaaaatggcctggctttccttactgagtatactctcaagactattgcctattacttttttccattccttcttgagaactacgctttttaaaacaagaattgactccatttatctttttcttttagccttctgctggggtatgccttctctaaagcaatgaataaaaaatgctttagctgaataaatggggcaaggatcaaggagtacaagctaatatttcacaatattatcctgccataaataaaagtatggtttaaatgacaatggtggggttaggagttacaggtcactgaaacaccaccttattcatgctaccagccccttggctttcctgatggcagcagggaagcaacacataggtagaattatgagccaacatcgtgactggagagggattgaaaatcttatttgttgtcttcctagactattacagttatctgttgaaattagactcaattctttggcgaaagtactcatttttaaggtccataataaattgtaactatgtagcctttgttgcatgagtttagtatgagctgattggtgggccacagtgaaaggcagagggaaatggatgttaactaagaggtagaagtccccttgaagttctgaccctgtcactaatgaagtctttatttccgtatttagtaattgccttttttttttttttttgagacagagtcttgctctgtcgccaggatggggtacagtggcacagtatctgctcactgcaacctccgcctcccaggttcaagcagttcccctgcctcagcttcctgaatagctgggactacaggtgtctgccgccatgcctggctaatttttgtatttttagtagagacggggtttcactatgttggccaggatggtctcgatctcctgacctcgtgatctgcccacctcagcctcccaaagctaggattacagacgtgagccaccatgcccggccaactgccttctttatatctcattttaaaaatttataacaaagaagtgggttgattttcaagacctagttgtgttagtttgaatgagatgcatacatttggcaagtctggggtctaagaaaagataaagatctgaatgctgaaaatctagagaattcaggttactgggggataacttaaagtcactagggaattcgggttactggggggataacttaaggtcactagggaattcgggttactggggggataacttaaggtcactagaacccaaatgcagggaagagttgggtgctctttggcaaataaacattcctgacttagcatttttcttaaacccgaacgtgccagctgtttttttgtttttttgtttttttgttttgtgacctcagccaggcttgcgtgtttattcatcacatattctaagctcatatacaactgtgacctgatccagccttcaaggaactcactcttgattttaggaatctttccaccacttcgatttcatcttactcctgaaacagtcagccagaactgtctaattcagtctatacttctgatacaaaactctacccagcaaccactatggttttgttgctttaggtacgtgttagaaagcacccacatcaatttacagaaaatccttaactgaatctctagtcccagaggagtcatattttattatatggtgctttttatttaaagagatcggtttaatagaaattactcaggcatttgaagtgatagctttaaaatgtgggactggggaaaataagaacacttgacctctctccataaaattgaattgttctttaggtttaaagttttgacagacaaagagaaagtgagagcaagtgagggtgaaaatatatccttatttggtaatgagtacccattaagaggacagtatattacatttcatcttcttacttcacattcctgttttaaggatttgtgagcaaagtgctgtgagacctctagagttaagaggctggagataggtagttttgatggtattttaaggagtgctccataatgtgtagtgtctgagtgctgaagcttaatcagcttcaattaaatccaaaacatactgaatagctcctatgtgtctggcattgagctgtgtgccaaagtggtggaaagatgtaagagccactgaggcttagagatgaaaaggatcttggagccactggtttcctgcctgctggagtttcaccatcaaggaccctttcgttattttccttctcccatgcattttattaaaatttttggtttagtaaaccaaattcactaatgggatgttattttcatatcaaagagtataattctgccaatcaaggcttctgatcagcataaaataattaggtttcatactgaatgcacaaattctagtcaaaagcaaagccatttgatgacatgtctgctatgttgccatttgctttaagagaggtaaaggtagcctgacttctgttcactctgtagtacagaatacattgttaacaagtcataggtatgttcttttaggtttctaattactgtcagcctctcatttcagacaggtgatgtgataaggtgaaatgattactatatttagactcaaaagtcctgagtttgagtcctcgtttaacgatctagtccatgagcttcagttttctcacctgttaaatggaaatgatgattatttcctggaaattgcatttccaggttgttttgaatgataaatgatatggtgtatatatcagctgtttgcaaaccagaaaaagctattctatggtaaacacatgcagtgggctgaattgtgtctcccaaaattcatatgttgaagtcctcacccccagggcctcagaatgtgactgtatttggatctagggtcttcaagagataactaagttagaatgaggtcatttgggttgatcctaatccaactgactgatatccttataagacgacgaaatttggatacagaaatacacagaagacagggagaagatggccatctacaagctaaggagagaggcctcagaagaaacacacctgccacaccttgaatttggacttctagccatcagaactgtgggaaaataaatttctgttgtttaagccaggagtcctcaacccccgggctgtggacctgtaccagtcggtggcatgttaaggactgggctccacagcaggaggtgagtggtgggcgagtgagcattactgcctgagctccacctcccgtcagatcagcagtggcattagattctcataggagcacaaaccctattgtaaactgagcacgcaagggatctaggttgtgcgctccttacgagaatctaatgcctgataatctgagattgaacagttttatccccaaaccatcccctccaccacccccgtggtctgtggaaaaattgtcttccacaaaactggtccctggtgccgaaaaggttagggaccagcggctcaagccacccagcctgtggtactttgttacggtagccctggcaaatgaatacaacacgttttagactatgatgttacacatgcagtgtgttgagagccaaagaacccaaatgattcgtggtatctgcccttgaagagtttttaatctttttgggcatgatgaaacatacacatggaaaataaaatagcatataaccaagtgcccaaatcagtaataaatacagttgactccataaacatttaggaaccttctatcccatgtttccacattctatcccagtggcttttgccactaaatttcttcacccactattagactgatgttttcatctttcagtatcagactcaagctttaatctagaaagagggggtggggggataaatgctatactttggaaccagtccggatattttaagtatgtttttaaaaagtataatcctcacaacatgaaagttattagttctatttttcaggtgagaagagttaaggtcaaacagacgaaagctagttagtggagggactggtattccaagcccattctggttaaactaaatcttgtgttctttccactagaaaactgctttttgtcttaattataattttgtgacaaggatgtatagtccattaaggaatatatacaacagaagaagcatttaagtggacttgaggtttgtgaatctgaactagtttctatcgactttcacatcagcagctcctattctggggaaagagaatggaggctgggagtgatcctgacaaaccttgatgtgcaggcttgtggagaaactggattcacacccaggctcgtggagtgtgggagaggctggcctgtcacaatatcaggacagcctctcttaataacactgcagaaggaatcgagggccctgtggtttgcggtcagtgtgcctcttgtgccaactttggcactacaatgtcttcaatcacattatcttccaaaccggctcttcatcctatgtccttatttctgctaatggtattcatttctcttattcatggactctgggaatcttggtggtattaaaacctgtctcttctttccccctcgatcttccacattccatttcctttcagcagaatcccaagccttcaccatttttcatttttggtgctgtttcagagttgctgtgaactttacctgggtcctctatcaccttacccagccatttgtcattctgcctggtaaagggttgagcagatttatctatatgaatgatcttatttaagctattctgtacaccttctgctacttaaacaggctctatgcttccacatctgctctctatctgcctatgtgactcaaacttcaattgtccatctcagacatcacatcctccatgaagccctcttgggttatttgaagtaatctctcttctgggctctcatagcattactgcttgtaactctttcaaaagatgaattttgtgctgttgtttacttaatgagtacaaatttagtgataaatttgaaaaacttgtgtccatgtttgataaatatgaaaatctcatcattttcaatatttcttagaatttcaaaatgtactaaatattattaaaaaccaatcatggcaattttaacattgagtattcttttttgaaatatgaatgctcctctctcaagactggtatactttctcactctactcccttttcaagtgcccttatcgaactttgctgatgaaatcatcttttcttagtttgttagactttggatggtggagacctgtgcctgctacttctctcatctcctgatacctaatgcatagtgttcagtaagtatttatttggtgataacaatatcaaaaactagataatgcttagaagatccaacaccttccaaaatctctgttaaccaggtactgaaatatggtcaaccagatgagctgaaatgtcaagaacttatagacacacatggtttcatggttgtgaaactagaagatgtggcatattttacacaatggagggaagagcaaaggttatgcatgtgcggaggcagagcccctaggcaggtttccctcttttccttcctgtgcactgatttttattttggtgaactgaaacaggggtctaacaaactggtatctcatttgtctttataaacagaactgccagattggctttgcaattcagggccctgtagggtgcccacctcctcagtttgggcagcagcattacatctgagtcttagaataaaaatggaaagcaatggctcaacccattggtttgtcaccatccacatgaaggatctctattggtaaaaaaacagactcccgtgttcaaggccctggggctggaatcaaatccatcattcatttatttcggttttttaaggctaaatacatagggaagaaaatgaaatgtgagaaagctgtgcattttcaatgtcatcttgaaagtgagtatctttagacacataaagtagatgagtggttaacttgggctgggagagggagtgaggagtggttgtacatggcacaaggtttctatttagtgtgattgaaatgttctataatttgattgatgattgtacagttctgtaaataaactaaaatgtattgaattgtataattaaaacatgcagattttatatttaaaatatactttgataaaagtgttttaaaaatgaatatctcatagggtagaatgaaatgaataagagaaacagtgaggcatccaggggactttctgcacagtgggtctgtcattaggcaggtacgttgccacagccagttctaatgcccactcataggccaatgcctaggacaattgctcagatatcgcctctgacaggcaagtgttccatcagtaacagcaggcatcggaagatgatgccattccctgctgttagtatgattatattgacttaggtttttaattttctttcttgctgtgttttttttttttcaccttcttagcctctaaagcatgaacatctgtgtttttcagctgccttttcagaaggcaataaaaagggtttgttcgatttctctcttctggatcttctggattatcagcgctccttactggcttaaccaaacacaaacatgaaacaacttggaaaggatcacaaaataaaagattgcagtgtgtctgctgtggactgaaccgtatcctccctcaacccccaaattcatacattgaagccctaacccccaatgtgattgtatctggagatagggtcttcaggagataattaaactcaaatgagttcttaagggtgaggccctaatccaataggactgtgaccttataaggagaagaaaagagatcatccccctcccaccaccactgtgggaggacacagcaagaaggcagagagccctacggaacctagcggacagctatacattgatcttggacttgcctacttccagaactttgaaatataaattgttgtgtaagacacccagtctgtggtattttatgatggcagcccaagtgagtacagtgtccttccagaaaaagaactatgtccctaagttgagggtattcacttctccataataatagatgctctgaaacattcatgccagtttgctcctgttgcagaaataaggacaggattgttttctttttgttttgtaatgcctccccaactaatttcccttaggctcttctcattcatataatctctcaagccagactgggtagagtcatccttgtctctgtatatgtcatccaagttatcttttctctatacctcagtcagtcactagatgtgatttgattttacttcctatatgatccttttatctgttctctcatctcattttttatcccccatgcttttgttcatttcaacatcatctctcatatgagttattataattacctccaaaatctactttggtgatacctttgcctgtcaataacttccggttacctccagaaatacaacctacttcaatgtctctcatgctctgtattagtccgttttcacactgctatgaagaactgcctgagactgagtaatgtataaagaaaagaggtttaattgactcacagttttgcttggctggggagacctcaggaaacttacaatcatggtggaaggggcagcaggcacgtcttacatggcagcaggtgagagagaggggatgtgtgggggaaccaccacttataaaaccatcagatctcatgagaactcactcactatcacaagaaaagcatgggggaaacagcctccatgatccaatcacctctcacccggtccctcccctgacatgtggggattacaattcagattacaattcaagatgagattggggtggggacacagccaaatcatatcacattccaatcccttgctatgtcttcagacctaattctactcattgctcttatattaatctccattactgctgtacttcttgcaggatatgagcatagcatatggcttcattcctatgtgtctttgacaggtcttttttcttcctgaaatgtcttcactcctgtatgtcctcatccatttttctgtacagcttaagtggtatttatggccagggtgaatttatattttaaactgggatacttttgagagtaaaagtaagcacttgttaattattactccagaaccacagatgtaaactgaaattattttaggtaaatagtaacaaatgttatcctaatctcagctaaaattttatactctgcctactttagaaatctataacacaatcagtaacacatcataactccccttttgtttcgacatggtcatggtcatttgcaaatagcagctgagaggctgacaagctgtgcagaactctagcagacttacagggctgaggagattaaaattaaatttctgggacttccaatataaagggacctggaaagaccccaggtttttgtctggagcctcaaaaaagttgcacaatagaaagagaagtgaaaagaaaatagaagagcatctataacaactccaacccagattcaaacagcaaaataccccatcaaacgaaagtgatttgctttaacttaattgaatatctgaagcaaaattaaacccaaatctcagaaaatatcatctggagcctcaaattatctctccagtttgtttttattacaatgccttgcatgtaataaaaaataattaggcacaccagaggactaaatagattgaacacaaataaggagaaataataaaaaataataaaagtaatcccacaagtcatccagatattgcagttatcagatgtggactgattaacatgtttaagaaattatgtgctaaaatgaaggataatagcaaacaactgaaaaatattaaaaaactgaaatcaagatcagaatataggggtttaatagccaattagacatagcttaacagacaactgggattataggtctgtttctgttccttttctctgaaagtaaaaaaaaaaaaatactaagactggaaaatgatacaaatttgtaaaagaagaaatatatgaaaaacagtgaattggtctaatatatatgtaagtaaaatcttagaagcggagaaaggaaatggcaccaaaacaatgttagaaaagatgtttaagaattagcaaaaactgatgaaacacatctaaacacaaatttaaaaagccttaccaacccaatgtagaaaaaacagaaaaccaaaataaggcacaccgtaatacaatacgcaaaacaaaggacaaaaagaaaatcttaaaagtattcagagaggatttcttgtttcagccaaaaatgagtaccttgtatcacattaacacttttgccaagcacagtgaaaagctagataaattttaaaaaaagaaggtcaaagccattggagtataactaatgcaggaaggatgtaaggtgccacaattaccaatggaagggtagcacattaagatgagcttcacagtcacactgacattttcctcaagggcatttttcagatcatggcgttgggggaatagtatctgagcagaagacaatagtatcattgacttaagaagacagaggttgtaacttggggctgtcaaagttgctaggacatgaaggccaatatctagagaggaaaaaactgtaataaaatgaggtcaaatgttgctatatctatgttgcacatgtacaaaataaaaaaaatcatgctgaaagcagcaaagatttgagcagttgtgactgttagggggataaatattggagtttcgagtcagctaaagcggacggaccctggtaactacctcagacttctgtctgagaattgggaaatgccacatcttaggagaaaggtctataccaaagggtaagggaaaaacctatctataaacgtagaacaaacctatcacaggatcagggtgatgtgcctatattctgtctgccacagaaaaattttctcttttcagatgaaggggtcattatccagagcctcaaaattttttattcataggtctattaccaaaactttttaaattgaggcatactatatagtacaacccaggccaggcgtggtggttcacaactgtaatcccagcactttgggaggccgaggcaggcagatcatttgagctaaggagtttgagaccagcctggccaacatggtgaagtcccatctctactaagaatataaaaattagccagcgtagtagtgtgtgcctgtaatcccagctactcgggaggctgaggcaggagaatggcttgaacccagaggtggaggttgcagtgagccaagatcacgccactgcactctagcctgggtgacagagcaagactccatctcaaaaaaaaaaaaaaaaagagaaactgcctgtaatgtgattcagatactgaagtcatcagagtcttcaaaataattttgaatagtatattcgagaaaataacatgaaaaatggatcttttcagcagagacatgaaatctgtaagaaggaatcaaattgaattttggaactgaaacatacattatctgaaattaacaatttagtagattgtttctattaattatgcaaaggaaaacaggattaataaacaggaagacaagtcaatataaaatgaccatattgaagcactgagaggagatatggaaaatatctaaagagtcatatgaaacaaaaataatatgtaaatagatactgaccaagaattttcaaacttatcaaaagtgttcaagatactccatgaattccaagcaagagtatcggcacctaggagaaactacatctaggcacttcatagtcaaattgattctttttaaaagtcaaagaggaaattttaaaaatactggagtaaaaagttacattaaaggaagcaacagtgatactgatgaatcccttttccacagaaatgaagtgagtctgatcgttgtagtataaaatctttgaattatggaaagagattatgtgccaacccataactcaatatccagggaaaatatacttcaaatgtgaaagcaaaatgaaaacacattcagacaaaaggtgagaacttttcaccatcacaaattctatattcttcatatagtagaatattgatctggaggaagcacagagatgcagaaaggaaaggagagcgtaaacatatgaatgataaaaacaaaattgattaatccaaaataaggccagaaaggtaaataatggaacagataataaataaaaacaaatggcaaaaaggtagatttaaccaaatgtattagtaatgaaatatgaatggattaaattctccaatgataagacaaagattgagagattagaataaaacaataaaaactggacatgctgtttacaaggaaaaaatttccctctgtttattaaggccaatgaaaactaattttagactgattttatttttaaaagttttgatgctgtctgaaaaaaattaatcattcaatatatttaaatatctgacaatgttgcaaatatccagttcttacatatttttactctagtcaatcttacatatggctaaagtaaaatctgtttaaatcagggattcttaatatgttgttaaaactaattaacagatgtatataactatttcatcttatagctgtattctggtttctcagtaaatagactgagttagctttgttgcagtaacaaaaaagaaattccctgataaaccccagttctgctgtctgagagctcagttcactggtttctacagctcttggtttta

SEQ ID NO: 497 - DNA, 20001 bp, Homo sapiens
tggagctttggcttcctcctgtgaacttgtggggtggggagcctggtgcaccaacctgagggacttgagggagtagtatcaggatgtgggattgagccctggaccttttttctagaaagaggaaaaaaatgaagggaggaggaggaggaagctggggagatcacacctttgattttcttgttcctggaaagtgaaaggaagttcacctgctatgagtgagaaggtggacacactgggtggggatgaggtgagtgacatgagcttaggaaagttgctgaggtaattggttgagagaggtgttcaaataaaaataacgcaattggcaaaaactgttactaagactttgtagaggcaccaatcagtgacatggcagcattttctttcacagtaatcaactgccagattgcagacagccctgatgccagcctaaggagtgtgggtttctcctccaggcccgcaggtccccaacctcactcctctgaagactcttctggagatcctctgtgatgcacagatctccagactcagtgcccccagactcagattccctgggtggggaggtctggggatctctgcttgtaatcagctccctagaggttcccatgtagccagataagtattgtcagaacactgaagatttttgaaaaatgaaaaagagaaggttggagatgtgtcttcagaagactactaagggtgctggctagaggagggaccagaggcagggagatgaggtaggaaactgctattatttgtcagggaaattgcaatcaaggcatgagttagaacagggaaaacacagaggcaagggagaggtggaagggggaggaaagaagtagtgacaattccagggtggatgtccacccaaatctagaagtaattgagcaaatgttttctgggcattagagaaggcaactagaacaaacaggaatccttgccttggtgaaatgtatttgaactgggtcagaaatgaggccattgggtatcaggccttaactccagcgcaccctggaggtcactgatgtggctccaggctgacctgctcctgtcaaagaatattgagcaagatgcctctcgtggaatgttctgggaccttaaaacagatacccaagtattccccctgatttcatggttcccagaagctctatggggaagaaattgtaggtaattcacaactgagatttagacataagttgaatagtgtaatggacattgagttaaccgaggtaatgaagtagtgagacacaggtgcccctgaaataaactcacattgagggaagaggctgacaatgtggatcagtctgaaaacaaggcaaaaatacaatagggagtaagggttgtgtgtcagttcaagactgtacttttacctggcccagcgccatgttagggtatttgtgttctccaggaagtagaaaggaaagaactgagtgattagggacctagaagactaatttgagacattcctcttgatgagctgttctctagggtagtcctctgaaagagctgttctctagtggatctccctgaatgaactgttctctaggagcacttgacccttttctgtgtttgttttttgttttgtgtttgtgtttgtttttgagacaggttctcactttgtctcccaggctggagtgctgtggcaccatcatggctcactgcagcctcaacctcctgggctcaagtgatcctcctgcctcagcctcccatgtagctagaactacagatacacgtaccaccatgtctggctaatttatttttctttttagagatgggttctcactatgttgcccaggccggtctcaaaaccctgggctcaagtgatcctcatgcctcaacctcccaaagtgctaagattataggcatgaccaccatgcctggccttttctgctttctgaggaggaaaaaggtactggtggcagagatccaaaagaaaagttgccagtggcagtgtggaaattcacctgagaacaacaggacaagctggggcacaaatgcaaagatgcagagggaggcaacacctggtcatctgtgagaccttcatgggacctgaagacgcagcacagaggaggaacttgaaaaaggacgggatttctactactcaagcatgtaggagctcaggatattctgtaaatatgaagattttgagtttttgtaggtgaggtaaaaaaatacataggttttttacagaataagacatgtaaagctctcttcattttctttgtattttcatgaagttattagattcacaggccaccataatgccattgtctgtatatcttaatttcaagatattatttgagtaaattttgcttcctttgtatcaagatagaactttgaaaaggtaggtaatttcacagttgatcaaatattctttgcccaaattacttttggttaaaatttctcctaaatgtgctacagagtgcaaactctgtctccctgccattccgctatatacttactaactattattttattcaagatcatgcatgctctacttgaaggtctatttctatcttttcaatgctacccttacccactagcctaatcacattattcctattttcaacatctaggaatcaattacatagtgaacatgcctaagaaataataatctgggcagatgcagtggctcaggcccgtaatcccagccctttgagaggccgagcgggtggatcacttgaggtcaggcgttggtcaagtgctcctagagaaccaggctgaccaacatggagaaaccttgtctctactaataatacaaaaattagccaggtgaagtggcaggcacctataatcccagctattcgggaggctgaggaaggagaattggttgaagcccggaggtggaggttgcagtgagccaatattgcgccactgcattccagacttggcaacagagtgacactccatctcaacaaaaagaaagaatgaaagaaagaaagagcgagattatgtctcaaaaaaaaggaaggaaggaaggaaggaaggaaggaaggaaggaaggaaggaaggaaagaaggacaatctcaaattctatttcattatttttcttccacgctcctagtccagcctagggtgaatgtttccccctccaagaaggggcccttgcagcaccacaacctgcttgtctgccacgtgacggatttctacccaggcagcattcaagtccgatggttcctgaatggacaggaggaaacagctggggtcgtgtccaccaacctgatccgtaatggagactggaccttccagatcctggtgatgctggaaatgaccccccagcagggagatgtctacacctgccaagtggagcacaccagcctggatagtcctgtcaccgtggagtggagtgagtctctgatgaccctctagaccccacctctgaagagcaggggactctctggctctggggtccactcatcttatcttctgcatctataccctggggccatgtccaaaccccatctttcttctataccagctcctgagcatagtttgaagccagggaaatggagacttcctgaccttggcttaggggttcctgaagattcatagttctcccccttgtcagagaatctagggacactgactggtctcgaaaccctcacacttaggaactgacctcacacataggaacagttctcttccttcagcattttagcctcttctcaggcattttgagaggcaacttccagaatcagcatttgccaccttgttgaggtcacacccctgttccagatatgagggtggctctttctgaatttcctcttagcaagctttttccgctgcactgtcctcatcccgatatgctgcatcaggctccagaatctcagacaggacatgagtagggatgcagctggtggaggtgacactaaacctgggtctgtccttcccagaggcacagtctgattctgcccggagtaagacattgacgggagctgggggcttcgtgctggggctcatcatctgtggagtgggcatcttcatgcacaggaggagcaagaaaggtgagaaagcctgcagggtgagcgggacttaccttcccctggcatattcacacttattccacgatgaggggtttgacagaaaagaaatgtcagaaagctctagaggccactgatatcagataatcggggaacaaacatgacctatagcgagagagggatcccaggctgggatcttaatgcagccagatgcatgaggtcccaagtactcaggctcctgcggagcgtccattgagtgatgggcaatggaatttggtgggatggaaatgtttctctaattatctgaggtggtttcaatggctgattatataacctttcgtctttcatttcagttcaacgaggatctgcataaacaggtaatattcctgctttgatttccttgtggggtgggttgcaggaggatatgagtcctttctgtgcattgtaacactgaggctcctccaggaagggaatctcaggcatgaacccctctttcaatgtcagccttcaggcaagtggggaaagagcattgcttggctccattgctgaaggaagcagagatcaactctgttatttatcagcctgagacgcatcctctcaccataatttttctctcctggacttacaggaaggaggctggcaacctgggataacttgtcttttacccccacagggttcctgagctcactgaaaagactattgtgccttaggaaaagcatttgctgtgtttcgttagcatctggctccaggacagaccttcaacttccaaattggatactgctgccaagaagttgctctgaagtcagtttctatcattctgctctttgattcaaagcactgtttctctcactgggcctccaaccatgttcccttcttcttagcaccacaaataatcaaaacccaacatgactgtttgttttcctttaaaaatatgcaccaaatcatctctcatcacttttctctgagggttttagtagacagtaggagttaataaagaagttcattttggtttaaacataggaaagaagagaaccatgaaaatggggatatgttaactattgtataatggggcctgttacacatgacactcttctgaattgactgtatttcagtgagctgcccccaaatcaagtttagtgccctcatccatttatgtctcagaccactattcttaactattcaatggtgagcagactgcaaatctgcctgataggacccatattcccacagcactaattcaacatataccttactgagagcatgttttatcattaccattaagaagttaaatgaacatcagaatttaaaatcataaatataatctaatacactttaaccattttctttgtgtgccatcacaaatactccttaaccaaatacggcttggacttttgaatgcatccaatagacgtcatttgtcgtctaagtctgcattcatccaccagcctaggcctcctgtcttaattttcatacagacagaaatgactccccactggggaaagagcaaagcaatacatgtagcactctttttcaaacactggtctttttttttttcttaacaatccaacattgttatgtgttttgcgtctcatattgacaccttttggtcaaggtagaggacatgtttgttgtaagctttctttttcgtgtagaggatggattcttcactcctgatacacacaatcagtgcacagcagctctcttatacatccagttgatgccttcagtctccctggcttcttacaagcatcttctgggccttgtgtgtccctgggcacctgtccctggtcaattcccgaaagctactgtgctcctcttgcccatctccccttgcaaataatatcttccatcgggggaccggcttcctccaatttcaggagaggtggggctgaaggcacagacttgggcgtcactggcacagatataagtaaatacagctggagtctgcagagaggctggactgagtcagggagtcaggaaagagaagccacacacaaggacaaccaatcatgtttctcataatcttcttaacctagggaataggacacaatcattttttctttttaaaacatctttatccctgatcagcctcatttcctcaaaaactataaaggaaaatgctgctgacttgtttttgcgtagtaatttcagctgtcacataataagctaaggaagacagtatatagtaaataaggaccctttatctgtcttattttcccttttggcttcacaggaaacttgtgagaaacctatgcagcataaaattaatatgatttcaatccagggattcaacgatggaaggaggtcatgagaatagcagaaagtcttcaaatcgagatcattatgaaatcctcagacccagagcacataaatcctaccctcagagtcactgagcagttaacattacaaattacaaaccatatccagtcagagtcattctctttcctgcttgtctcctgtactcatgttacaggttagggcagtaccccgagtggagtgaacaatctctggactaacacttgtcaggatcagaagctgaggtatctgcacccacattacaggaacaggatatgtgctcctagggaactgagggtgtcaggagatgaggaatgtccctggagtcacagaaagaaggtatcagatgtgtctcactctgacatatgcaggtgtttatgaaactctgggatttctaaggaaggatgcagtgcagagacaggtcccagaggagacaagagctgagagaccatccaaactgggaccaccttgtcactagacttcaaattttcaatattgatagagtgttttctaagagtcaggccctttgctgagtgctatgtgcagcaggatcaaaggcagccaggaggtagaggagtcttgaggtacatcagtcattggagttgaagagcagagattcaaaggaaagttggaactggagctttaaaggagatgtgaagtgggtgactcaacctctgactcagaaaaattgatacctgcagaagaaaaaacccggcgggcttaggactcccagctgagtgttgtatcctccatccctttccacctggtcccttcattttctacccctcacagttccctaacgagaaggtggtccacccaacagacaacactgcctcagatggttatcaaggggtaccctaagaagaaatcatctcaccctctctttgtccccatttgtcaagtagcagtgaggccgagccaggggatggtgaaagtggaaggaggtgggagttgggcatcgggtgtgaagatgctcttgaaaggggttttaataaccacttgctaccaggccagtgaacacttaccatagttgatgccttttgagcatgttgcattgtaaactgtccctgaaattactgtgcacttggcttatgggatgaaacatcctcctagttcttttgtctctcagcttctctgaagtctcattgagcaccttctcttcaatttcttttacacagtaagaataggatcagctgtgctaaactaacaaatacccagatatccaggtttggctcatgttacacgtccaaagtaagtcatgcaggaagctctgctcatcatcgtactcaggaagtcaggctgacagtctttctcctgcacatctgctcccagaacctccccagcagaatgaagggaacctaagaatttattcactggcttttaatgatccctcctagaaagaacacacttctcgcatttcattttccaatgtaaatcatatggctgcaactaacttcaaataagtgggaatacttgaaggtggaaaacatttaagaagtacacactaaataaataataaaatacttctacaagagatatttatggaggacctactgtgtaccaggagcaatgctaggcattatggatatcagcagcctttggctcctgaaaagcttacacactacctcctggcctaaggaggggcacagggatgctggcaacagtctatttcttcacccgggtactagttacatgggtgcttgcggtgataaccattcaacgtacattctattggtttgtgtgtttcttccaaatgtcccctagttcacaatagaaagggcttaaatagagaagtaaaggagaatttgggaatttgaagcaaaagcaagaagccactgaatcaagcacaaatattgagctttgataaagattggaataagaaacataataaatgagacaagaaataggacttttgcaactgaagtgtaattaataaacaaaaagccaaactgagaaactgtcccaaggacaatatgatcgagtaaacaatagaaaatgtaaaggacaagtgaagagaaatgaaggatagaaacagacatctgacatcttaataattagacgtctagaaagtcagggaaatagtggaggaagaggaaataactgaaaacataatagatgtttagtctttatagaaagatgaaataagttcattcaaaatgctgcatagaatgtcagactgttaaacaattttgttagagtaaaatgactgtaaacaaatgagctaattatgtgaattaagaggatggaaaagcagaaaaacagcaaaaagaaaatacatgtaaataataaggacaaaagctgaattcaatgaaatataaaaatagagaagataaaatcaaattttgaggcaatgaaaactttaatgagacctctggcaagactcctaaggaaaatacaggagattcagaacgaaaagggtaaatgacatttatacacattttaaaatgcaaaatcttacgaccaactctatacatataaatttgaaaatttagataaaacggatacgtttctagaaagatataaaggtcaaaactacaggaagaaatagaaaactaaaatagagtagagaatatcaaagaaattgtcatgggaagcaaagaatcgccttccaaagggccctgtcctgatcttattgcagatgagggtgtcctcccacatttccaggagcagatcatgcctcttacacgtgtgattctagaacatagaatggaacagaatttttgagatcattttatgaggttggttcatttatatttccagagccagctaagaatagtacaggagaacaggattgtggactaattttagccatgtcactgaatccaacagtacattataaaaacaatacgttttgaccaattttagatttattctaggaatgcaatgattcttcagtgtcagaaaatatataatgtggttaacacattagtggactccgcaaaattcatattaatttaaactgaattcagctcaagacatagacagaatttaatcaatttcatgacatgttaaaggtagtgaaccaaaaatctatagcatatatatttcaaagaaatgaggtggattgcctttgagattgtgcaaaagataggatgtccttcgttgctggaaatgtttaacatagcattggaagttctgaacatcactctgcgggcagaagaaaattaaggctgtgtaaaatgtaggaagacagatagtgactgcagatgaaataatctaaatactggacaagactgcagccactgcaggcccaaagcctgggtttaaatccaagctttgcactttgaagctgtgtggtcttcacctctcccggtgtctgattcctgctctgtaacatgaaataaataagaaccaacctccagatgtaaataagtgaacacatgagaagcacttagaatagtgcctagaacatagtaagcaactcaatgaatgtcatttctcattacatttgttaatgtttttatccagcccaatggcagtaaaacatcaatgctcaaagagcccctggtgaagtgtttctctttcccactcttcacccctaacttgttacctcgtcttttccactctgtccctaatacacctataggatgactcataggagcccctggacccggggatgctgtcagatcgcttggtctttgagacaatggtgccattaaggacccccgccaggcccaccagcaggccgagggcacagaccagcatctccatggtctcaggcacctggattagttcatggacctctggggcaccaagggaagacagagttataaggtacagagagcaggggctggccttggatgtgggaggtgttgggtattcgaaaccatgagatggtgaaatttggataaagtgaccataaaacatgggattgaggaaggcaggtgctgaggggcgatgggcccaggaaataaaggtggtgccaaggccgtgagggcagagggagggcgctccataccccagtgcctgaggagaggctggtgcaggccccagtgctccccctggaggtcacaggtgtcctcggccatgggaacgagggtcagatagtggaacctgtgtaatctgagtttcttgctgggcaggaagatggtctctgcaataccctcaatgactggctccccattgcgcagccacgtgatgttcagcactggtgggaagaacttgtcaacatggcagacgagggtgttgggctggcccagatccacaggctccttgggaaagacgcttacctcggtgggggctccaaaaggggatagaacccaaggagcctactgccattggctgattcttaaaggttccaccaccccaagtcctatattcaccagattaggggccacctctcccaggcccatcctcctgctcccctagggctcctggacagggtcacagcttctcgtgctcctgacctggccccctcagcccagcctttctcttgagtaagaagaaaatgcctcctcctctgctgtcctaagaacccagctgtgtggacccaagatttctcgctctcagggaaggggctcattcatgagtgggcatcatggcctctagttctatgtgtggcagagaggccctcccatccctccagctggactctagaggaacaggcagctataggcagtgccatttgtggcccaagtctgtttggaccattgatccgggtgttcaagtgcttccttgccatgacgatgccagcaatacccctctgagaggaacaggcagctataggcagtgccatttgtggcccaagtctgtttggaccattgatccgggtgttcaagtgcttccttgccatgacgatgccagcaatacccctctgagcaccaaagtcaaaggtgtgaataaactctggtagaggccagaccatctccttctcatccaggttcacgtagaactgctcctcctcatcaaattcaaacatatactccccagagggtctgtgcgtctgcacaaactccgcatatgttgacacatggtctgctgcatgaaggagaagatggagaatgggtgaatacgtaggatgctacacagaatgcaggaagcaaacaggtaacaggaaggttattgggaacatgaaggaataacacagaaaatgagaaatgcaaatgaaagaaaagaaaaggagtgagaagaaacaaagacagaaatgacccatggacgatataggttgtttcccttgtccctgaagacttaacatccgtctatgataatggtaatgctgaatacagtaagataatatttattgggcacttactatgtgctaaacttactcattgaatcttcacacccccatgtagaagaacttattttccatagtagggaactgaccccagaggtaaagtaacttgtccaagtcacacaactcctggtagaaacaatattgagtagtcctcctacctcattcctgtaggatctcagaaaccctacaggacaatacattaaaaattactgatatagccataaagcaaggcagggaagtggaaggatggaataaatatttcagagtggaacaaaatcgtgaaggacatgaaaatacctccagagtcttagtgacatttatagacttcaagttacattcttacttttagaagaaaaatgataccttctataattttatccacaacacttacattttaggcagagtaaatttaaaagtattatcattcacataacattcacaaaattgtcttgtggagtgtagttttcaagtgtagtttcacctggaaatacaagttgttggcatttgaaagacctatgggatagtatcttagctttacctgatacataagaagcagcaactggttgataacaaaaagtgaattattattacagtgaattacagagagtttagggttcggcctggaagaggaagtgaagccaaatgacactgcatggttggtggtccctaagtgaggatttcccctcccagcccagcatggggagaaccagtcctctacttagatgcatagtgtgacagcaggttcagtgccgcacacggatggtgagggtcccccactgagtttagggtctagaggattactcacctacagaaatgaatcccaaaggaaaaagaaaaatacatggtgtatagactgggctacacagatgtaattggttcagcttaggttactttgtatttattatatttacaaaatctgaaaactaaaggttggcacattttgaagcaaattccacacttcaaatgttaattttcattcagttaataaatgctttttgtgaactttcactctctaggtaataaggatgaaactctaaagatgggaactttgtccttaatctacttgaaattcaagaataaaacagacaaagaaaagatgattgctacatgtgtggtttgatcaccactgagtatcacaaggtatacacaagagctactcaggagcaaaattaaaatacgatttaggaaaggttcctagggacagtgttcacctgcagatagcaaaacagagaaaggggaaatggcatttccagcaggagaagcaggctcaggagcagagaggcatgaagttgcaaggagaactgcagttcttcagtgtgactgaagccaggggagatgtgggccaggcagcactgtaacctgccttgtgtgctgatggcaagtgtttgcattttatcccacaggacataggaagttgtgaagtatcttaagcaggagagtaacacggtcagatttgtgtttggatggggcacctgtaggaaggatgggctggaggaggcgggactcaaggcaagaccagtagcacttttaagccctctggtgggaagtaatgaaggcgtaggccagggcaggaacatggggtgaggaggacagcagatggatttgatggcagtaatgacatgagaggccacaggaatcactaaatcacatgccagaagtagggatatgaagaagtcgagaataaccacgcaacgtggagaattgtggcatccgtgcctgcaaaggtgataattaagtgattgagagaaggtaaaattttctgtttgagacatactgaatttaaacttctaggggaaaacatacagttgatttgaaggcagtgaaataaatggatgagtgtcatgctacattaggttagtgacataaactggaaggaggctcatggtgggtgaagttctaattttgggtcaggtcactcaagaaaagtacacaaagtcaggatagcagggatctgagtgtgtgctcctgcatccagacaaacacagacatgaagaaagaggctgaaaagcagaggactagaaattggtaggaaaacagagaggaagtgggttcataaaagacaagagacaggagaaaacttccaggaaagaggagagggggcatctcaaacacactaatgacacacataagacagaaacagaacagtgaccactggcttgagttgtataaaagtcattagttgccaccctgagaggagcatcagagatgagggaaagaaaaagagagagtacattgggttgaggactgaatgaaatgggagaaaatcgataataggctgggcacagtggcccatacctgtaatctcagtgatttgagaggccgagacaggaggatcacttgaggccaggagtttgaaagcagcctaggaaacatagtgagagtccatctctaagaaaacaattttggattccctgccttccatgagcaacacagcaaacataagctctgcagatgtgctcagacttgagcctgactcactgaagagagtgtggtgctgccaggcctcagacaccagattataatcaacctcttcccaggccctgcacaggagaggcccactctgtggggcatacagtgcccaggggtggtacaggccctgcagagaccacagactgttcacctgacaagaaatatcttgaggaactcacttcacagatccctcaagaaaggaaccactgcaggagaatacccagaaaatcgaaagaattcacagatccttttaaagaagggaggggccactgcaaactccaccagacaagtgaaaaactgtgcgttcccaaagcgtgagaggggaaaaacctgcctccggacccatgtccccactggggaactcgaaaatccagattacaggaaaaggatttaactttacctagacctgaaacagatttagcatgaaatacaaaagtacgccgggcgctgccgctcacacctgtaatcccggcactttgggaggccgaggcgggcggattacaaggtcaggagattgagaccatcctggctaacacgatgaaaccccgtctctactaaaaatacaaaacaattagccaggcgtggtggcgggcgcctgtagtgccagctactaggaaggctgaggcaggagaatggcataaacccggaaggcggagcctgcagtgaaccgagatcgcgccactgcactccagcctgggtgacagagtgagactccgtcgcaacaaaaagaaaaaaaaaatatatatatatggtagatgcagcagtgagaagagccttgtaggcacgcccagtctttagctcaagcccagggaagccacccctgactatatctcacaagggccctgggggaaggcagacggcaaaatttggaaggggtcacagtgtgaaaggagcgtccaactgaaatttgttataattctgactgggcacaaatcctctggagcagaatctgggggcgaacggaactgctggagaaagagcagaagttactgccaacattgtgggcagacagggaggcacatggcctgaaagctgtgcttgctttctcagcaggaaacttatagcctggagtgaggtctgagtccatcctgaaggctgcagggagataaattcaatgctgttagtgtggcacagcaggagcaaaacctgcctcgccaactgcatgggagctgggtgaagcctattgctaccaggtttcccctacttctctggtgacagaggcagccataatgccctctggaacataattccattggctggagaaaaaccctccgccccatccctcacagtggctgccgcaagccccccgcccgaggagagtctgagctcagacctgcctaaccctgtccacacctgagggcatttctctacccacctggtagccaatcacaaaagacgtaaactcttgggagctttatgacaccactcattgcctgagaaactgaatatttatcttggccaacttagggcaagcttatatccaccttctactattgtagctggtgccctcttgaaagcaccacatcctggctggaggccaaccaactcaggacattacaacaattcacgacagaataactgctctaagaaaggagaaaacagctaattccactggctgaaaaatcttgactaaccagtggtcttcggtctgttcacatgacaactgcactgctagcataaccagcatttgagaaagccaccacactaagtctatctacaaccaaggattctcacagagtctacttcactcccctaccacctccacactggaccccagcaatagatccaaactaagaagaaatctctgaattgctagatagagaattcagaaggttgattttaagctactcaaaaagataccagagaaaggtgaaaaacaacttaaataaattttttaaaaacacaggatatggattaaaaatgccccagggacgtagatatcataaagaagaaacaatccaacttctggaaatgaaagacacacttagagaaatacaaaatgcactggaaagtttcaacaataggatccaacaagtagaagaaagaacttcatagctcaaacaacaagcctttcgaattaacccagtcagacaaagacaaagaaaaaagaactttaataaataaacaaagcctccaagaaatttgggattatgttaaatgacctaagaatgattggcattcttgaggaagaacaaaaatctaaaagtttggaaaacatatttgagggaataatcaaggaaaacttccctggcctcgctagagatctacacaaccaaatacaagaagctcaaagaccacctgggaaatttatcacagaaagattatcgcccaggcacatagtcatcaggttatctaaagtcaggacaaaggaaagaatcttaagagctgtgaggcaaaagcatcaggtaacctataaaggaaaacctatcagattaacagcagcctataagccagaaaagactggggtcttatctttagcctcctcaaacaaaataatttccaggcaagaattttgtatccagcaaaactaagcgtcataaatgaaggagagataaagtctttttcagacaaacaaatgctgagagacttcaccgctaccaatccagcactacacaaaatgctaaaaggagttctaagtcttcaaacaaaactccaaaatacaccaaaatagaacctccttaaagcataaatctcacagggcctataaaacagtaatgcaaaggaaaaaaataaggaattcaggcaacaactagcatgagaaatagaacagtacttcacatctcaatattaacactctccacttaaaagatacagaatggcaggaaggataaaaattcagcaaccaagtatcttcagtcttcaagagtcatctaatgtgtaaggactcacaaaaacttaaggtaaaggagtggaaaaagatattccatacaaatggaaaacaaaagcaagcaagagtagctattcttatatcagtcaaaacagattttaaagcaacaacagttaaaaaagacaaagagggacattatacaatgataaaaggataactccaacaggaaaatatcacaatcctaaacatatatgcacctaacatgggagcttccaaatttataaaacaattattactagacatgagaaatgagatagacagcaacacaataatagtggggacttcaatactccactgacagtactagaaagtcatcaagacagaaagtcaacaatgaaacaatggacttaagttacactagaagaaataaacttaacagatatttacagaacattctactcaacaactgtagaatatacattcttctcatcagcacatgaaacatcctccaagatagaccacataataggccacaaaacaagcctcaacaaatttaaggtaatcaaaattatatcaagtcccctctcagaccacagtggaataaaattggaaattaactccaaaagaaaccttcaaaactatacaaatacatggaaattaaataatttgctcctgaatgatctttgggtcaacagtgaaatcaagatgcaaaattctctgaactgaatgataatagtgacacaacttgtgaaaaccactcggacacagtaaaaacagtcctaagaggaaagttcatagcattaaatgcctatatcaaaaagtctgaaagagcacaaatacaaaatgtaaagtcacacctcaaggaactagagaaacaagaacaaaccaaacccaaacccagcagaagaaaagaaataacaaagagagcagaagtaaatgaaattgaaacaaaaaaatacaaaagataaatgaaacatgaagctgattctttgaaacgatacataaaattgatagaccattagtgagattaaccaagaaaagagaggatccaaataacctcaattagaaacaaaatggaagaaaatgccactgatattacagaaatataaaatatcattcaaggctaatatgaacacattcacaggcacaaactagaaaacctagagaagacagattcctggaaatatacaaccctcctagaataaatcaggaagaaatagaaactgtgaacagaccaataaaaagcagaaagattgaaatggtaatttttaaaaaactgccaacgataaaaaatcacagattcacatggactcacagctgaattcaatcagacattcaaagaagagaattggtaccaatcctactgaaactattccaaaacagagaaggagagaatcctccctaaattattctatgaagccaggatcgccctaataccaaaaccaggaaaggacataataaaaaagaaaactacagaccaatatctctgatgaaaatagatgcaaaaatcctcaacaaaatacaagctaacataatccaacagcatatcaaaaagatcatacatggtgataaattgggtttcatgccagggatgcaaggatgatttaatacacacaagtcaataaatgtgatagatcacataaacagatttgaaaacaaaaatcatatgatctcaatagatgcagaaaaagcatttgacaaaatccatcatcgcttttttattaaaaccctcagcaaacttgacatacaaagatcataacttaaggtaataaaaaccatctatgacaaacccacagccgaccttatactgaacggggaaaagttcaaagcataccccctgagaactggaacaagataaggatgcccactctcaccacttctattcaacatagtactggaaatcctagccagagcaatcagacaaatcagtaaataggaagtcaaactgtcactgttcaccaatgatatgactgtatacctagaaaaccataaatacttatccaaaaagctcctagatctgataaatgaattcagtaaagtttcaggatacaaaatcaatgtacacaaatctgtagcactgccatatactaacagtgaccaagctgagaattaaatcaagaactcaaccccttttatagtagctgcaaaaaaataaaatacttaggaatatacctaaccaaggaggtttactgggggaaccagcccccaatatttcaaagtatgttcttttctattttccctaagtgtgggccagtctgagaaataaagagaaagagtacaaaagagagaaatttacagctgggtctccgggggtgatatcacatgtcagcaggttccatgatgcccacctgagccgcaaaaccagcaagtttttattatggatttcaaaaggggtgggggtctatgaatagggaatgggtcacagggatcacatgcttcagagggcagtaaaagatcacaaggcagagggcaaaactagaatcactgatgaggttccacatcccgctgggcacacattgtcattgataaacatcttaacaggaaacagggttcgagagcagagaaccagtatgactagaatttgccaggctggaatttcctaatcctagcaagcctgagggcactgcaggagaccagggcatatttcatcccttatcttcaaccatgtaattcagacactcccagagtggccattttagagacctcccccgggaatgcattcttttcccagggctattccttgctgacaaaagaattcagcgatatttctcctatttgcttttgcaagaagagaaatatgactctgttctgcctggccctgcaggcagtcagaccttatggttatctcccttgttccctgaaaattgctgttatcctgttcttttcaaggtgcccagttttcatattgttcaaacacacatgctttacaaacaatttatgcagttaacgcaatcatcacagggtcctgaggtgacatacatcttcagcttacaaagatgacaggattaagagattaaagtaaagacaggcataggaagttataagagtattgattggggaagtgataaatgtccatgaaatcttcacaatttatgttcttccactgtggcttcagccggtccctccattcagggtccctgacttcccgcaatagaggttaaacacctgtacgaggaaaattaaaaacactgccgaaagaa

SEQ ID NO: 498 - DNA, 40001 bp, Homo sapiens
tgagtttttgctatttttattatattttctacttctgtgattagctttatctatttcacagagcttatcaaattatttgtcatacagttgattaaaataatcctttataattatttaaatgcactctgtatttaggttactttcctagcttcattcctaattgacaaactccaccctttttttatcttggttggattagcgaatgcatctctgttttattgttttctttccttgttttcaaataatcgactcttagatatacttagtatttctattgtattttctgtttcctaatgcatttatttctaaatcttcatctttgttatcttaaagctgtaattcttattaatgtgcaaatattcttagaaagagacatattgaaactgttaataatcatttctatcttaggataaatgagttccagatattgtcgtgggcctaggttttggaaacgggaaaggatagttattagtcaagcaattacttgagtcctagagaaggggatgggggtgacaacaagtataatcatggagttcagagtctggggagatacacatttcccatgtcatagagcctctctttacacattcatcagaatgtgtccctgtaacatcaccacacaatggtttggtgttccagggaagcaaataacttagtaggtgttgggaaagtgcttaaataaaaaacatgggcttcagtgacataaattatgaaacataagtcatggtactttttgtttttccatagtataaattaaacaaaaccaggaaaacagcttcatagggaggcttatatctatccaataaaattcccagtcaggatatttattcactcaaaggcgctaccagaagggacagaacagatggatgacactgtgacagcccagggctgcctaagacagccatggagtcttccttctccctgcactgctctcctttttctaattgaagtttgaataccatcttgcattttcaatattcttttgtgcacttctatttgatcctaataacaacctcgtttattagacttttcttgtgtactctctcacatccaaccaaacacgtcttactaccctttttttttttttttttttttgagacacagtcttgctctgtcacccaggctgaaatgaagtggcttgatctgtgctcactgcaacttttgcctcccaagttcaagctattctcctgtctcagcctcccaaatagctgggattacaggtgcgtgccaccatgcctggctaattttttgtatttttagtagacacgaggtttcaccatgttggccaggctggtctcaaactcctgacttctttctcaactttttatttccagggtttccttctgagtttagaattttattgtttcatttccaaattcctgtggtagtcttccatcatcctggaggcgcgataggctagctgttgaaaaacaactcctgaatctcagaagtataatatgataaggctttatttcacaattacatcatagtttaatacaaggtatgagttggggtagggcagggtcaaaaattgtctatgttgtccttcagggacctagactttatatatctatggccccacccccctggagcctcagagttccccactgtatcctctgcctctggctgacagatgagaaatgagaaagtgtgtggacaattgtgcaggaggttttcagggccagagcctgaaggtggcatacgtggatcctgccacactctattggcaggaagtcagtcatatggctgcccctaactgtaagagaggctgggaaatgcagtctagttttgtgcccaagaggaaaagaaaatatattttggtgaaaactgcatacttggacacagccagcctctctgcccacctatgttgcatgttctaccagattagcattcattcagtcattaaacaaacatttactaaataccactatctgccagctactacgctatgcaccatgaatacaaaaatgcataacttctaattttgccttccttggaactcacaagctagtgggagataagaatactaaaaaaaaatgtctacattgagttaagtacagtggtcctcccttatctgcaggggataccttacaagacccgcagcggataccccaaacacagatagtacagcaccctatatatgctgctttttcctatatatgcatacctatgatgaggtttatttatttatttattttagacacagagtattgctattttgcccaggctggtctccagccctgggttcaagtgatcgtctggttttagcctcccgaatggctggaactacatacataatttacaaattaggcacagcaagagattaacaataactaataataaatagaatatttataactacatactgtaataacagttatgtgaatgtagtctttcccaaaatatcttattgtactctattcacatgacagtagtttcttcaccggcagactcagcctctccagtaatttttatatttttcagcccaaacatattcccgagtctgtataaccacccctcactcgcaataaatggctgatgtcacttgtttctggggatcccttgctgaagtcttcctacaggctcaatgctttctggcacaacacattgctgtgaatcggaacatgttgcattcatgtcttccacccacatctttaatgccttttccatcataattaagcacttattacacactgtggccataacttttgcagttttagatgcagaataaaactagcacaaacatctttttccttcttcacaatttcacagatagaggatttgtccttaccatagatccaaatctatggtatgaaaactaagcatacaatatttttttctttccttattaagtcaaggactttgatctttttatgtaaaggaagtacttgacagcttctctttgtcatacctaaattgccagcttcactacttttgtgctttgaggccattatgaagttaagtaagggtgtcttgaacacaagtgctgtgatgtcacaacagttgatccaattatccagccagctactaagtgacatgcgcaggcagcatctacagtgtggaaatgctgaacaaaaggatgattcatatgccagatgggatgaagcagaacctgctgccaagcaatgtcttagcctctagtaatgagaacagaatgaatattaccctgatctatccttctactttgctccttgcctagacatatgtaggttgcttactgagctgtcggggtcatgatttgacttacctgtaagtccaggttgtggtacacttcaggtcaccaaggacttttactgattcttcatctaacaatttcaacttcaaagctattccaagctctggacaatcattttggaaatgatctattggtggctgctgctggaaaagaccatcacacaagactatacccttcaatactggtatggaaaagtatatgaaactgcctttcctataagtaaatggcttctcacattatcatttggtattcaaccctgatcagcacaacatccatccctgagaatgtcatgggagctaaggagacatagcattcattttggtttacggccatcagtgttgcccaagtgccatatagggagtctctcaggccatgctatcagtgcccagggtgccaactaggaatgccacctattaagaagtcttttcagaaaaggaaccagaaaaactgcctttgtattaagataatgagtagacacgcaaccttaggaccagcagagtctacagcagcttctcacttcagatcaactgaatcataatgagcatatagcaacctgctcttttagatgggtttcaaatcaccaactgctagactgtcaataccacaaagttgatgtcttatactcctatatggatgaatatctggggtcttcaaaagccaacacatccaggagaactgtgcccctagagagcttagaggtaatacagtcccacatagaaatgaagggccaccttaggagatggcagcaaaccattgtctacatccaggaactccttctagaacccaggagtctcttaacttggcacctgaagaaaatatgggttagaagcttttgcttgagcaatagacctgcctcagcaggcaagtcttaagcccaattctttcatctgtcgtggccatggatctctagtgcagtgttcagaactacacagaaacttcaaggatgtgttagaagataaattttaatctgtgcattttttatttaaaagcaaagagagccaaaaagcctataaataatttaaaattgaatgatgaaaaacatttaattatcccaaagaagaaagaaaagaaggaataaaaaataattataaaatggtgaacatttcccaaacattaatcacattttttttttgtagctgggattacaggattgtgccaccatgcctgctaatttgtaaatttttgtagaggtgaagtctcactataatgcccagtcttgtcctgaactcccggcatcaaaagatcatcctgcctgggccttccaaagtgctagtattacaagtgtgagccaccatatctggactactttaaatttaaatggactacacatacctaataaaacatgaaaactgtaagaatgaattaaaaaaatgcaagactcaactatatatggcctataagagatgtactttatttattcatttatttttattgttattactttttagcttcctcgggctgaaagagatgcactttaaatataaagacaaatcgattcgaagtactttcttaagggaataatagaaagccaaaatcaatggaatagaaaacagacaaacaataaagaaaattaatacagataaaatttggttctttaaaaagacaaataaaattgataaatctgcatgtagccaaactgttgaaggaaaaaagaaagataaattattaatattgggagtaaaagagataatatcattactccagatcctacataccttaaggatgataacggaatattataaataacattacaccaataaattcagtagttcagatggaatagatggattttttgacaaaaatagtttacccaaactgataccatatgaaataaaatcttttaaaaatactatgaaataatagtaacaaacaacatgaatataataacaaatatagggttataataattataatatctgagttgtcttacatctattaaaatttttaattacttatcagaaagtttcccacaaaggcccagacagttttactggtgaatcctatcaaacatttaaggaaggaataacaacactcttacataaactatttaagaaaatagaggaaaagaatacttcccaacttgttttatatggctaccaaagcagtgataccaaaatctgacaattatgttcaaaagagaaaaaaagaggccaggcctggtggctcatgcctgcaatcctagccctttgggaagccaaggcaggcagatcacttgagcaaagaccagcctgggcaacatggtgaaaccccatctctacaaaaaatacaaaaataagtcaggtgtgatggcataagtctgtagtagctagttgcaaggctgacgcgggaggatcacttgagcccctgaggttgaggccgcagtgagttataatcacgtcacggcactccagtttaagcgaaagagcgagactttgtctcaaaaaagaaagaagaaagaagagaaagagagagaaagaaagagagaaagaaagaaagaaagagggagggagggagggaaggaaggaaggagagaaaaagaaagaaagagaaagagagagagagagagaaaaagaaagaggagggaggggaggagagggaaggaaagggaagaaggaacagggagaggaaaaggaaggaaaggggagggagggggacattaaagagaaacaaaaaaattacagaccaatattcttcatgtatgtagacacaaaattatttttaaaatataagtaaatcaaatcttgaaatacatgtaaaggatgatacactataaccaagaggggtttatcctagggcttcaataaatgagagaaaaaaataaatgtaaaataggtgagcaaatcaaatgtatacggtaagatggcaaaagtaaatacaaatataaataattaaatgaaggtaattgaccgaatattaaaaaaaaattcggacttccagaatggactaagaaacaataacaacatacctcataaatgcaatgtatattaagaaaacagcaaccatatgtagtttcctatatataacaaaacagaaaagttgaaagaatgggaaaaaaatcacacaaattaaataaaaagaaaattggtgtaactctactacgggttgattatcacttatctaaaatgcttgggaccagaagtgtttcaaatttcagatttttttgaattggggaatatttatatgtacataaagagatatcttggggatgggacctgaagctaaacacagaatttatttgtttcatatacactttatacacattgtattttgtacaatgttattaataactgtgtgcatgaaacaagcttttcactgcattttgactgtgacccatcacatgaggtcaggtgtggaatttcctacttgcggtgtcatgtcagtgctaaaaaactttaagattttggagcattttagattaggggtactcagcctgtactagcaatgataacagactttaagccaaaaggcagtagtagaattaataacaagaaagcttcaattcactgggaatgtttaacaattctaaattcatatgtacctataatatttacatggcctcaaagtatataaaacaaaaattaacaagagctacaaggagaaataaaaaataatgaatatttgcctcattttctcacttgtttttaattcactgaattatgttgtattttgtgctcatttgttagttggtttgaaatttttttaggacaaacagggatacagcttaattaattgattttaaaactctaatagtgagacctcacctaaattattaaaatttatcatcatggtccctaatccccttctgagaaggaactggaagtgtgttgtcttggtaagaaagcccctcctttgggcctaggacctctcaacaaatgctactttttaatgagactttcctcttttggtcaatagattacccgtaaattaattgaagccttaggccttggatataaagcaagtaatgtgacttcattaaaatactaaagttacagtgacaatactatctttgaaattaaatgtaggagttgcatctcttgtttttattttcattttaaatcttatttattcttttatttgcttcttttgaagtttatttaatggtaatgcacacaagagatacaaggttgaaaacacatgaatggaaatattttttaaaaattcatctctttggcctccgctacccaagccccagttctaaattgtacaggtaacccatgttacagaaagttagactacccaacaaatgttcttcacctcgcttttttttttactatttaccctagtcactatttcatatcagtttatcgagtgggtaccacattttttttaatgtcctgcatcctgcataacattcctgcatggatgaagcacatttatcttacctgcccctttgctatcacagacagcattgcaatgaacagcattgtatacatacctttgtgttcttgctggagtgtatttaaagagaaaattttattaagtgagttgggtaaaacggtacaaatgtgcgtttaattttgataaacattgccaaatcatcccatagttaaaagttctacaaatgtactctcccaacaattactgaacgtgcttgtgcccctgaactcttgccagaacggtttattattacaatgtttatctttagcattctgattggtgaaaaatagtttcttgttgtcatttcaagaaggactattcttatgagggggttgagtatcttttaaaaatactataaaataatattaacaaaaatatgagtataactaatatagtgttatgattataaacacaataaatctatcataaatatgaaataagtaatataagatatactatttgtcaaaaaaaattgcattaccaatcagatgaaagccactgtatacccttccctagttgaatttctctatctcgttatttcagaagtatttgctaccttgaatttaacatttatcattttcaggtatttatgtagatcttgcaacacatttatttactcccaaattacatatatttgtgtatatgtgtgtgcatataagtagttggcatgtttttaaatttcatatagtgtcatattgcaagtattcatcctgcagtgtgctttttgtcctcgacattattttgtgataattcactcatgatatttatgcagctcagattcattcactttctactgctcagtaatccattgaatgaatatataaccatttatttattctactattgatggtccatttaggctgtttccaatttttgctctttgtgacaatgctactatgaacatcattgtaaacatctcttcatcgacataggagcagacctgctgggacctgctgggtcacagggtttggattcttcagctttactacatattgccaagttgctttcaaacgtaactgttccaatgtatgctttcatcaacagtatagaagagtcctcttgcttcacagttttgccaaacttggctttagaaaatattaattttttgccaataggatgcatttgaaacaaaatttcttacagatttagttttcatatgcctgattatgaataagactacacatcttcacagatgtgtaaaagccatttgtgtttttccttatgtaaactacctgctgtggtgttagctcatttttttctattaggttattgttttttgtcttatttttaattgctttgtagaaagatttttattttaggagattaggtacctgctaccttaactatcattttttaccatcaatagtttttctagattttcttttttcttgtgtccttatttatagtacctttaaaaccaactatttaaatttatatattttatatatatttacataaatataactttatataaatgtgatcacatataggcattttgtatgtgtgcaatgtttttccactttttatgtggttttctccttagtctctcctacttttcccctcatgtggcttccctgttccccctacaaagataactcatattataaactttacattaattattccatacttttactgcattcaaatgcctctatacgacttgtacatttatgtacatactctgcaggatattttaattttgtcattatttggtttataaacatgcaattatgctaatacaaattttttttgctttttatattttcatttaacaatactttgggaaaatacctctaagtaaaactgtgtgattctaactcatttttctaatggctcctaaattttgttgtatcaacaaaaattttgctaagcaaaaatcacagcatagaaagttacagggacctaaagaaggaaaattgtacttagtcaagattttataaatatattttggatatgtatatgcatgaactttaaagtgacattaagaggtacattttactccataaaatttgttgttgtggaaattaaatatatgaatgtatatgtacttcttttgcttatatacttatgtatctatattatatataattttgtatatgtattacataaatatattttttatatattagagatacctatcatatattatatatttatgatatttatttatattatttatatatcttatatgaggtaaatatatatttatatattacataaatgtatagtatatataagcatatactatatatgtgtaatatgtgtatactatatattgtgtatatatctatacacacacatagagaaagtgagagagacagagagaacagagccaagtgataggaagtacactctattcctggctcagtaacagactgtgtggaagtgggggaataatttcactctgtggacttcagttatctctcctgtaaaatggaggatagagtcaggacatagacggctcttccgacgaggtcagagttcctcaaggcaatttaggaggaatccaaggtttgccaaggctttgcattcaccagctgacatggcgccaccacgtggtaatagtgtaaacaatttaaaatgtattggatccgtcagcttttaaacatgattcatcaatgtttaatttgaggaattaagattatttaaactttggtgcataaactgagactttattaatatgtttatttttcactatttgaaatttgcataaaatgtgactacactgtatagacagggaagttttgaaatctaacattgtttctgtaacacagagtaacaaccaactacatttaaaaatggggaaaatatgataatagaagaattattcacatcagaaagtatattttaaacaacaatatacaacatctttaatagccatatggttaaaaaaacttttcaaaatgcctaaagttcctgaaattagtttagtgagtggggtaagcgcagagttgggtgaaaagacacaagagtacctcaagaacttttattgttaatattatattatcgtttagacttcaaaatatttgggatttacactaaactgaagcacattacacaatctagtagtgagatagtaagtagaatcaaaatagagtatcaattttgtttatttaatatttacatacgtattgtcgtttattgaaataactgtatcaactcttgctgcttttagatatttgattcgtttttttagtaaattattaattttagtacagttttagattcacagaaaatttgcaaagaaatgaatttccatataccccgtacccaattttctatgttagcatctaacattaccatggctcatttgtcataactaaataacaaacattgatacattattattaattaaaatttgtactctattcagatttgcttaattttaatctaatgttctttttctgttccaggatggcatattacatttagacattatgtcttcttgtgttcctcttggctgtgacaatttctccgattttccttatttttgaaggctttggcagttttgaagagtattagtcaggtattttgttgaccgttcctcaatatgggattgtgagatgtttttctcatgattggactggggttctggttacttggaaggaagacaacagaggtaacgtaccattctcttcacagaacatcaagtattcatactgtcaacatgacctgttactattaataaccatgatcttctgttaaccttgatcatctggccaacgtaatgttttccagatttctccattggaaagttactctttttcccactttgcctgtaataccctttggaaggaagtcactatgcaaaacccacacttaagaggtaggtagagagctatactcacttccttaagtaggaactatgagcataagttacccagaattccgtatatttgtctcttttccacatttgtttatttattcagctatttatattggaagaactcatgaatatttattttatactttggattacaatccgttactacactatctatcttgatgctcaaattgttctagtttgggccattgggtgttccttgaggttgacttctcctttccctttgacacactcccatcgttttggttttgaagcacttctttacttcctgacactacaagatgctccaagctcatcttgtatatttcctgccccagtcttagaatcagctatttattcacgttctggttcatttcatttgagaatggtattagaaaccaaccaagatgtgggcacgaggcgtgacttttgttgactttggatcctccctctgtatgtatttacataaacgctttcctctccatgtcctgatcatcttaaaactgagcttgttttaaatagagctttgaaatttttaagaatagtttagtcaataagacttcttgcactcttgctaactattgtttcaattattgctactgttaacaccactactccactaatggtaaagtttgtcactctcaaatatgaattccggataaaagctttctggagaaaaatatatgaattatttacgcacttttcctcactacattccttttcactaaatcagcagccaacaaatatgtgtctctaagggaataaacagagctgtgtgtacatatgcatacaggtgtttccctttaggcttcttattggagcacattgctagaagaaatctgccaaaattattagactttgattcacttgcaagcaacacctgtgtgttctcttcatctttacatttccaaggcttagctcaatgcttgatacattccagaggtttcctaaaggtttgccgaataaattgcagagccccctggaacatggtgaagtttaccatcaatcatttaaatgcatctcagggtttgttttgttgttgctgttgttgttgttgttgctgttgttcttgttttgggggggattttttgtgataagtttttgttgtactttatctgcttgtttttgcttaggaaggcttcagtgacagtagttaaagaaattgtggtcactatcacattttttttttttttggtagaaactgatttcatctctctgatactgttttatctgagccatggtaaattaatcacagttttaggcttcttcttcactggtaaaataaagcccaaactgctcatttaagagaaaatgcttggccaaaagaagcctgtaaaaccagagtgtgcttttccttgattcacagtaaaacatgaaccctttatttgagctctttatgacatggaaaagcatttctatgtattgtgttgaataagctattcttcccccggatggtattgaatttaattagaagaaaatatcttcatgaaaataaagctttaatgatatactgcttcattttaagaccataagtcatcgtatcctctaaatggtgggataatgatgctgaaacaaaacactaaagagggaaaaagttattcatttggtgttcagtctttctgtggaaaacgtgtgtttttattctttatcttccttatatttttacttccaatttcccacttaaaagaagattctcttgtatgttctattttaattttactctagattcagtacaatttcataaaatgaaattcatttaaatataattcaggaaccaagccatcttgaatgaaagtattttgagacagcactcagggtttcaatataaacaccgccatcatccatccattcattcattcatccacctattaaaaatctgtgtgtctgttgccatcctggtgctgagaaaacatgagtgggaaagagagattcatcacctcagcaattcgcagggaagaaggaaaaagaaactgaataacgtagtaggatggtcctagctgagtgaaagagagcatgagacctggatatgacctgaagtctggttatataagagtttgtatgagatagcctccaaagataaagtattgtgcacaagtgtacaacaaacggggtaggtgagaactgagacaacctgcagtcttgtctctgggcactagtgtttttctttttctgtcttctctttttaaataacaattaacatttatcaagtgtttgcccaaatctggacactgatctgaatattttgtgtgttcttagttaatacttcattcttcacaacagctcgtcacaacacttggtgcactgagacagattctgtgttgcctggagtaggcattgtaactctcatttccattttgcagataaggaaacagaagcacagagagtttacataatttcactaagatcatgcatccccaagtgttgtagccaggatgtaaacccaggcagcatgccccagagccttcctcctgctctaataatggtctgcactacttgagctttaaggagaggggagcagcaggcacaagcagaaggagttgtttttccaaagggcttcatgagacaggtagaatcagtgaagaggggagtgtggggtgcacacagtgcttcttaggtctgtcaggtggcaacaggtgacctagagtcggagattgaatctagcctcgctccttgagagtgacggggtcgggagccctgaaatccacacatctcagaatggataccattatcatttggaacaatggtggccctgagacattctctggaaacttcagaagcccaaggatagtgacaaagagggagagatgttgggaggaatcagggtacggatggcatggatcaagaaaataagtgtaacctagaagatactctctgggaactgttcatgatgctgggtgtgttgatacagcttaaaggttatttcagtgtgggggacgctttgatggccttgtcaaaagtgtgtaagcattgctttgttagttattgatttgttttcccaagcagtgcatatgacatccctgaacctttctctgctttctaggtacaccatgattatgagagatttatgtttttcacttcattgagcatggtttaaatgtttataggtctgtattactttcataaactgaaaataaaaatctctcataatttgatagaattgggttaactgctaagaaaataacagtgctttattttaaaaaaaagcttcaaaatagtaatcatagtttaagaatattgttgacgtgagagagacatgtcagaaatttaattgagccttactatgcagtccagatttaagaccaagggatcatacaggtggaccaaatagtcaccttctcagtgtctttaaggcatagatgagaaaacttgaggtgtttcactgaagatgcaggtgaactctcagacatgagcagatgtattgcttggaatgactgatggccttttctgagatgagtgagtgtagtaagctgatttcatgactgtgcttctgccaaaggctccagcctagttctcctctcatctctaagccccttccctcttagactaccactctatccgtgaaggtaaaaataataggttgagtttttctcaaaagcagggcaaaggagttcattttccccttacctagcaatacaaattgttaaaagaaaaagaataaactggaataaggctgtattcaaatgtctcatcaaaatgtccctgccttgggaaatgctttgccaaagtgaccatttccaagtctctgaagtcaaaacagctgcatcttagtggctgcctcaaaatcgtggtatgaaaatgactgtcaaaacagccccatcaaaatgtcatgtacttggagcccatgtgagatgctctgtagacatctctgggcataatgggacaggaatctcataatgggttcccctttgtatccacagtcccttgaagcttcgaaatacccgtattaaaatgatcacaccacgaaataatctgtacagccaactcccacgacacatctttatctatgtaacaagcctgcacatcctgcatctgtgcccctgaacttaatagttaaaaataataataataaaataaaattatcccaccaactaagcatcagggaaaaagtaagcagaagcttttacaggaggaaaactccaggaggagaaagcttcctgtgggaagggacatggcctggggattggagagatgggggtgccttggagaaggggcaacagggaggaagaaggtattccaggcagaaaggacaatgaacacagagacaggaatgagaaactgaatgggacgatggccacaacatacaggtatttcaggttgctcactatccaacctttactgagcacctactgtatgctttagcatgttgtccccatcattttggagaggacatagtcaatctagtacatggtacaatcttttttccttccactcagcaacagcaaaatacatctggctcccgaaacagtatggttttccctcagatatttttctaaatcacattgatttgaattaaatagttcagaaaaatgattttttctctttgttttttgaaatcactttaatcagaattaaatacagagaaacgatttggtttcttctgaaacacacagttacactgcaaatataaacatacaaaaaactgctgaccacttaagtattaaacattcacttggtatgctacagcttttggaaaataaaataccaataattactcaattttaataataatactttgcattctatagaatcaaaaagtgtgctgaaatatttgaaatactatgtcaatcttctttaaaaatgaatcttaaatatggattaagtacagattattttccagtaacattactattaacctgaatgttcccatggtaacaagacatctaacagaatataaaacagataactttcaatatttaaatcataactcataaataaaaacatgtctgtagttgtgtgaaagttacacattaattccattgataagggatgcagaaatctccttagaaatcatattttttaaattttgcattaattttttataaccaatttctgattataaaagtaaaaatgctttctgtaaaataaattgtaaaaaatagcaaaagaataattaagcctgagatgagaaccactaatctttgttttaatcatttttgtatgttgttttatttataagttttaaaaacaaaatttggttcagagtatcaatttagttttgttgccttcatttgttacttcttcccatatcagttatttttaaaatttgctttatagatggtagattcatgatagtctctacaatgtaaccatatacttcctgcttcagtcatttttgttttttagtcttgtccacaataaatctaatacttggagttgcgaagtcatactccatgccctcaaaaaataatgactaaaatggtgttaaatttctttatgtccattttttttttactgattttatcaggtgatctctataagcattcaaaattgactaaggatgttttagactaattagccctcactacacatttcctatgtctaaaatacagtaattgagaaatgttgtaggaacacaaccaacctaaacaacctaacttgtgaaagagaatttagggagagaaaatgccttacacgaggacttctttgttattaaatacatctgatttccataattttaactttgaaacagtgtcaaataccagacacacacagattataactgtcctatcatggtccatttaatagcacagggaccgtaaaatctgacagacccaatttactggaatgtaacctcatggtcagccagggaaatgctgactttgccttttggttgcaactagcagcaaggaagataaatttacactaagttgaagaaggcctccatccattaggagaaacgcagctggggaccaggaactgtgggaactaggaatggaaagatttgggaaaatgggaagtcctttttttcccccagaagtctcatgtcagccgctctctatcccttgatgtgtggttgttcctctgcctagagagcgccttctctgctcctgggtccatagggcaagggaagatggctgcccacaggtctgggactcacgggaagattcacgccctgtacatccaggaatggattctccctcgctcccgttcacgaggtaattgtctcagcttgactcaggtgcccaattttgtgcccatcggctgtgaccagggagcagagtcaccttgtaaaagcctcagtgctctgatttcccactgattattgaaggcaggagatggtatgacgctcctgattttttctgctgtcatcatgtggctgaaccgtaggttctgaattcatacaaagtatgattttccttttactattttttaatttttgagaattgtattaatagtagctgaataaattttccttgtatcttgtgtataaacttccagaccaaatttttctttgggggatcttagtgtaggtgttgttctgcaatttgtttttgttttgatgcttaaaatgtcatacatattagagttacatacttttaatgaattaatttttagatgtatacaagtaatacatgaatgcatttttattgttaaaatctaggaatacagatcatatggatgaaaaagtcaaagttctctttcacacacctggactatcattttttaccttattaggactgtggtttatatatattgctctggaacttgaattaatgtataaatatatactcgttatttaacaatacatagctttaaaacagtacttaaaatacatgtccagaggaaaaaacaaaatcctctttcaacatcctccttctacaagaattcaacttactttccccaaattgctattaacagtttgatgtgtattctggattttttttctacgtatttaaatacacacatccatgtaaaaatatacagttggggattttttaacataattgggatcacagtgtagagattaaatagaactctgtttattagaaatttacagatctgtgttgaagatggtttcatgtcagtatctgtagacaacttataaagttctgcaaagcattccatatcatagatgtttcataatttaactattccttcattggtcgatatttatcatttccatttttcactattaaaaatatcgtgatgatgaaactatttgtatatatttcttcatagccatatgaggatatttttctacatcaaagaaacaaaaatattacaaaaggatactccagaaaaggctgtaaacatttcatttctgccaatagtgtatgaaagtgcacatttccacacaactttgccagtcttgggtatcagcaatcctttttaatttttgccagtctaaagagttaaaaatatatagctgaactttcttttgttataatttgtgtttcctgataattagtgagaatgggcatttctttatatattcgttggtcatgtatattttttcttctttgaattgcctactgatatattaatatgttctttttttctcttgaagtttttactctatttttaaaaaatcaatttgtaggaataatttgttgatctgtcatatattttgcaaatatttcccagttttaactttgttcatggtgtttcatcatatgaagttttaattgtttaagcagtcaacactattagtctttttccttatggtttctagatgttctgtaatgtttacaaagttttttaccacaccaattttataatgtattgtctaatttgtaaataagttgatatattttctaaatgtccagcttttaaaactatctagaattatttgtgtatgttcgtattgtaaattggaagctattttactctaaatagccaattgtcttatttatgtaaatgactaatatttacccagcaatttgaaaatctacctttcttataaattaaattctcatatataattgatctgcttccagatcttattttctacttatctatcactactcttatgacagtgctatactgtttcagctatcttaacttgatatatgttttaatatgtggtttttcttttttttttttcacttttcctgaagttctcacatgtttttcttctggatgagtttaaatatcttccagtgaagttccacagggtgtcttttgtggatgtctttccaatttccttccagtttcctataggaaaaattcccacatgttggaaaactcacctgtaaaaccatctgggactggtgcctttctgagattgatctttggctatcttccaggctctttggtagttattgatctattcaggttttctatttctgcttcattcaaacacaatcatttgtattttttagaaatccttcccttttatctagattttcaaattttttatataaaatagtcttccttactcatttcttatgctggtaattttctcttttcacattttttgttgttgttcttttacttttttcttaattggacatgacaaagattagttgaccttatccatgtggataaggtctcctctgaactgtgttgctttgcttccccaagtagtcccttctccaaagcaagacctaattgtgtgctatataaagtcggcagggcattctgaccgccaagttccattctgagcaggaagaagtcaggcaggctggtgacctcccctgtccagttaccaaaatcgagagggctttaatctggggtgtagcccattggcattattgatcatatgtttcctttttttttcccctctgtatctgtggtggagttccaggggagtcatccccagctctgctcagcttctccagggcaggataattctctgaggggacctcggcctcccatggcagattattcaccctccagagagggtttttctgattttatccaggggcaaacactgctaatccccgccactcagcttaagtggaaagggagaaaggaataaggtgcccaactggcctagctatttcaagaatgtgttgactctgagctcggataatcactgaaattccttcaacactgtaaaattttctcttacccgtgttttagcctgaggttttctctaacctcgtttcttcgtcaacctgatttcatttggtttctatttatcttcccagcaaatttcattttctgggcattctttctcattttctagcactgatatagatttactcttgagaaacaaataaataaaagcatttctgccatttccttaagggtttgcaagtgagaaagggtgtatacatgtgcactcttccacaacttttagtctgtcttttaagagtttgtttacaccgaactaaagaggatagtccaaataagttatgatcaaaataaagactgaattaggaacccttgttgtgttctcatttcactgtgtacttcctttcttaacagttaaacctgtgtaattgttaagtcgcggtgacaacaaggactgcatccgtctcgtgtgtcatttgtatccctcgtgcacaacgttgcctcaaacaaactaagcattccataaatactggttaaatggagaagtggatcgattatttcatgcacaaaccaaaaatggagaaaatcactaacacgatctctggagggtttggtgcaagtttagctagtgacaggaccagagccaggacccatgtgactcctcctcgggtgctctttccactgactttcttgggctatttgctttattaatgcctttcttccaatcatcacttaaacaaagacaagtgaaaagaagtctgactttagctgacaatggcagaaatcatcactctgctgaataactaacataaacatcaacttcctacattagcacttcaggacatcagctcaaatagctccatcccttctttccctgctattgtgtcccttattagaataataaactgaagctcatatctcctctctgattatgttgtaaactttattagcatttctggcctttaatgcctttgcaaaggaaaagatggtggttagactctgtgtgggtgtgtgggtgggtgagtgtgggtatgagagggtgggtgtatagagctcatttgtttgttgttttaaaaatttaacatctgagttagggagaataatgaattggtaagccactggtttcctagaataagactgtttctttccagagaagagtaaactggcccttttcgattttgttctagcaacacagtaaccatggatctgtgaacctaatagctaaattgtggtaatcacagaacacctttctaaaatacactttgatataatccatttgtccaccaacagcttaccacaggtaaatagatgttatttttcttgccagtgattatgctgcttatatgtctaatgtgaacgatgggctggacatagcaaaaatatttttgtttgcttttattgtaatttttgttttcttactttctggtaaactctggacatagtttttttgttaggagtttgtgctttaatttttttcttctacagattaacatgaaggtgattattaccatagaattatttaccaaaacacttattataatatagataaggccctactgagcttgttcctgaaaaggcttatgttatgaataaaatgttaattgttatatacagtcatttctatggaatctgggatgttttcaggttgtaggtcccgataaaattaaatatatctaccttatattaagtaaatagttaccaataaaatttttaaattggcattcaccagtttctatttagaatggtttgtacatgaaaaaaaaatgatcaactattttaaaagataggatatgcaatttcagtttagccagaaaatacttctatagaaaacagggcaacctgccacagtgtctcagattgggcttgtcagaatagcatcgtatcatgaaatcatggaatgctacagattgaaattactttgaagatcttttagtctgcttttatatgtacagtggtgtgaatttgctccatgacccttgaacataagaaaaaataatgtttcttaacttttctgagtcaaatcaaatcttgctaggccctcacctcttaggattgttgaaaatctgttcttcctcatttggaaaggtgggcctttccttgagccctgtaaaaacccagggtcatacacagtgtagagaactctgggagtgatcttctggcctgctatcaaggtccctgggatgtttaatttgtcacttcagctaggctatggtgtccagttgttcagccaagcaccagtgtagatattgctgggaagatattttttagatattagcatttatcagtagactgaatataacaaattgctcctcagaatatagggaggcctcatctaattgaaggccttaattgcaaaagctgagacttcccaaagaagcaattctgcctcaagactgcaacatagaaattccgcctgagtttccagccttcaggttgcagactcaagattgcaataccaactcttccataaatttccaggcagtgggcctgctctccaaatttcaaacttaccagccccctacaatcatgtgagctaattccttaaaataaatctctctgctttggttctgcttctctggggaaccctgattaatacattcccttttgagctcttcactggccacgtgttgcattcaaagttggaccactctgctgctctcaacatcctcaccctctttggtaagtccttgcccctgtgatgcttgctttggtcgtcaaagcagcagcccttaaggttcagtcccaggactccacatgctgcctcgccagaggtcctgctccatcctgaggccatgtgatggcagagttctaatttgtgtcactttggggtctcactacttttctaccttctcaggctctgagaatccagctcttccccaaggttgagtcatgccccaaccaacaccttcatatccaagcattagaatctatccttttccaccgacctcaactctgacaccttaggcagaaccaactacctctcaacaaagacctgagtgaggatatattcaagaaggattttaaaatacacacaaagctgtttctttctctttgggcaacaaacccagaacacaaaagcttgacattatgtactaggaaatttactcttttattcctttgattattctatatcagtaagaacagacacgaactaattttcgttaaactatcttgctttgaatgtaaggagccaagacccagaaaagttaagtggcttcctcaagtttcccagaacactcctttaagatgaataagatgctatctgatgccctatccctcccacttcccactccttcaccttacatctggctataagcgactgcatgtttctgcaagttcatggaggaaccagtgttgaaactgctttgctacttcggtttgaaatggcaggttggaaattgatgcatcacagtttctggggctgttggctgccagagcctccccatattattcagccacaggctttggagggaagagggacccttctgaaatatgcaacttagtgcaagcttgaaattcagtgggcgccacttggcattcatgattagaaagttctaaaaagcattacatgaagtataactgctttatccctccttttgataagtaatcctctctgtttttgtttttgttttttagtttaccagctcagtagaggaatgatgcaaaatggggctttgggctgcggcattataacttgggttcttcctatcgatctcacaggctcattatgtaagcttatttcttctgctgatacaggagcaaaaaaggctgacttgtgacatttttgcagttgcactcagttgtctaaatatactcagacattcaacagtacatgagtagccagccatttggttttgcagccaagaaggctgtggctgaggattgcctgagaaaatatctgcttttgatcaaaataaaattcaaaccgtaaaccaatatatatatttcattgcctataataatctttgtcccttagggtcataataaaactgtcagctttatgtgtcactggatctcactcacttctccctttccctcacttttgctctcattattcacctactttgtagctaatgatttctaaattctggttggtttttttagagatctgctttctgtagaggttgtcgtatgatgtccttgaatttttttatgtttaattctaagagagtggcataagttcatcaggcatgaggacatagagtgtgaaatcagaatatgtccccttgtcatggcaccatgaaatacatctgccaggagcagaagtctcaagatttccccaaaatctacttctgccagattagcacctgtgaccactgccttgtggccacacattgcaagtattataaaaagcacattgtacaaaattaaaacaaagctcaaatcctagctctactgattgcagtctgtttataagtagtgtgtaagttacttttcctctatgcctcagttgcctcatgcataaaattggagatttaaaacaaaaaatttacatcacagagttgctaagaggctttggtgaattagtgcatgtaaagcctgcagaatggtacttggcacattgtaagcactgaattagggttacagcagtccctgcttatttagggggaaatgttccaggacccttaattgatgccaaaactgtggataacactgaactctatgtatcctgtggtttttactgttcatacctatgataagttttaatttataaattaggcacagtaagacattaacaacaataactaatgataaaataaaacaattataacaatatcttgttgacatggtttttctgtgtccccacccaaatctcatcttgaattgtagctcccataattcccacacattgtgggaaggaccagtgggaggtaattgaaacataggggtgggtctttcccatgctgttcttgtgatagtgaatacgtctcaagagatctgatggttttataaaggggagttctcctgcacaagctctattgcctgctgccatataagacatgcctttgctcttcctttgcctttcaccgtaattgtgaggcctccccagccacgtggaactgcgagtcaattaaacctcttttgtttatgaattacccagtctccggtatgtctttatgagcagcatgagaacagactaatacaactgtaattaaagtcacatgaatgtggtctctctctctctatctcaaaatctcttattgtactgtactcacctattttcggaccatggttgaccttgggtgactgaaaccatggaaagagaaactgtgtataagcaaagactattgtagttattattaaccagatttttgagagacttttgttctgttttactgaagactaaaatagagtttacaagaaaaaaagtgtatgtattatatttggctctgttatgaacactgatctagaacatagtaatattcctttggtttcctttggataaaagctgtatgcttattctaaaaaagtctttgctttcaggcaggagtatttgagattcaccctcaacaagtggtttttgagatcactgtagcttcaaaaattcttcagatgattgtctagattcacaaccatttccttatggtttggaaagaaaacagagaggagataaaagtaataagcttggcttaagatgtagaaggtttaaattctaggctttctttggctgcgtaaaagaaagtctctgagatttagtttcctcatctgaaaattgaaggtgtccctgcaaagaagctatttaggaaacaattctgttggagcactaatttataacatacaattttaagttctagatatttaaagagttaaatgtgagagtaaaactatttaagtattaatataaagcatagatgaatatctgatatggcataagaaaggtctttctgtttagggcaatgaatacacaattcaaaacaatatgtttacataaatacatgaatgcatgaagtgtgtgtgtgtgtgtgtgtgtgtgtgtaaagcttacctctcgtgggggagtggagagtaatgtgatcaaggaggggtccttggcgacatcaactctaatgttagttttttaatttcttacatcgcaagaaacatctgaaaagggaaaatcgagttatcaaaatttttaaaataacttctataaataaaaaacttaaaatataaaggcaaatactacaatagcatttttaacaatgtagcagggaaatatatatactatataaacaattcttaaaaactaataagaaggatgaaaataccattataaaaataaataaaagaatacaaagccaatcacagtgtgtggacctgatatggatcttgattccaagaaacaaactgcaaaaaaaaaattagaagtataagacaactggaaattttaacacgatatctgctgaaaacaagaattattgctaatcttttcaagtatgatcatggtactgtagatgtgtttaaaagcatccttaatttttaaagatacattcgcagtcatttacagatgaaatggtatgatatctgggttctgcttccacataatacaggggtggggttggtggattagaggtaaaactaaaggaagattgtccatgagttgataattgttaaatatgtatgatgggctcgatattctgtcaacttttgtgtagtgttcaaaatcttccataacagaaggaaaacaaaaagcgtaatactgtgtaggatgatgaataaacaattcaatatgtttacatagatacatgaatgcatgaagtgtgttctctgtgtgtgtgcgtgtgtgtgtgtgtgtgtgtgtgtgtgtgtaaagcctacctgccaagggggagaggagaggaatgtgatcaaggaggggtccttagggacatcaactctactgctaatttttttatttcttatgttgggcaaaacataaagtggtggttgttatattattttttattttattttgtgcatctttgttattcctttatatgaaaagatatttttaaactattctgtctccaattttttttcaaaaatagaaaaacatgtttgtttctgtttttttgtttgtttgtttgtttgtttgttttggagacagaatctcatgctgtcacccaggctggagtgcaatggtgcgatctcagctcactgcaacctcagcctcccgggttcaagttattctcatgcctcagcctcccaagtagctgggattatagtcatgtgccaccaggcccagctaacttttttgtacttttagtagagacagggtttcaccatgttggccaggcaggtctcgaactcctgacctcgaggtatcagcctgccttgacctcccaaagtgctgggattacaggcataagccactgtgcccagcctaaaaacatgttttttaataaaagaaaaaaataaagctaaccattagctattaggaattttagctaaaaggaatacaaatttagataagattccatgttgttttttttcccagcagattggaaacgattaaaacattataataatcagtgctggctaaggcatagtgaattagatatccttacacactgctggaaataaaaattattttctaacattctggaaggcaacctgatgtacaaagcaaagtaattccattcctaggtagttattccatagaaataaccagagagaatcacaagatttatattcaagtttgttcattgcaattctgttttacaggaaaattggaaacttcagtgtctaacactagaatgtagttaatacatgtatgatggtatgttcataaaacagaattctgtgttggaattaaagagtcatgtttctaatgacatggaaaatatgcttgacatattattaaatttcaaaaagcaagataaagactgtgcgtatagcatgattccatctttgtaaacaataaacagcatctgagcgtgagtgtggtggcagggctgtctcagtttgaaattgtgtgctgccttctgagatgtaagcaagtctgggcaggcctaaataactggtaggtggccttccgggcttttctcagtttgcttgggggaatgaaggaacctcctagaaaataactcattctaagcaaaaagggagttgtagaaaacagtgtgactgtaagactaggccctgggatgagagactaccctaattctagtccaggggtgtctgaatcctgcatctgcctgggctcaacctctgggatctaggataggagctggtcttgggagacagaggacggtatgcaaaggcaggaagagctgcttaaaccaaaagccttgcaacacatcagagcaccaccgtgttttggtgtgccacagcggaatgtaacacagatgtgaaggagggctttctttgctgcctttctgttggcctgtgcccagcttggaaccttgaacgcttcagtgtgtgagggccattcttgattgtaaaaagcagccaggggcctgccatgtgggatccgcctgggctagtgcctgggcacctgtacattactctctagaaaccacagaaacatgttgggagcagggcaagattttccaggggactaaggtcctgcatttttacaagccagtaaaacagaggtgacactatcgaagtgaccctgtgtttaactccagatgggatgacttgaagaaactcacattacacatatatgtatatatgtccagaaaatgaccaaagaaaataaatcagaatgttatttgttcttattataggtgattttagtttttctcatttctgtgtgggttgtgatggtatcagtttaagattaaatatctctaccactgagatccagatatgacggagcattcctgaaaaccttctggtgagtgttctatgatcactatggtgaaagccccaggtttctggctcactgaaggcctgaggattactctaagatattttactctgaagaaaaagaaagcagatttgatgtttattactactgttattaggaaaatattgaatatgctatctccattcccttttaggtcaaatattctatattattttataattctgtgaaaatgtttataggtccataattaaatatcttagactcatctaggaatatgaatgtataataaataactcctgttgtacaggttgcgtttggctcacaaaattctctttatctcctagtagaattcactaaaatagtcacggagaccattgatttaagtacattcttaggggctgggtgtggtgattcagacccattatcccagggatttaggaggccaagtaagaaggtatgctgcccaggagtttgaggctgtagtgagctatgatcacaccactgcactccagcctgggtgacagagtgagaccctgactctaaaaactaaataaataataataagtaaaatattaacataagagatccaacagctagaaatatctataacaataaaaaacaataaaataatttacttaaattgtttctatttctgccagtcttttcaatccctcacatatctggaagtggctctgtctttattttagctattagtgtattaaactgttttggatttctcagtgaagctgaaatatgaaaatgatgcttttgcatatatcagggaaccatgtctgacacaacagcagtttcatgtgatataagataaatgcattaaggtttcaaggggaggagaagggaaagatggatcttctgagttacaaaatttgacaaagacaatttgaatgggatactaataacttgtattttaaagctgtcaaagtcctgcatttactatatataaagtactcacagtctttgtctagaagagtaccacattaagaatattgtttttagttaagattttgagcttttagaatatctgttgattatggaagaaccagccttttgattaagattattcctacattgttcccatatttttccatcagcattcatagttcgttattaatatggtgatcatgtttgtttgggtgaatggcctttatcatatttcagtaatttcctttgttttctactttacatttagcattaagagaattttttatcacaacacttttggtatctatgatatattcatggctcttctcctttagtttattgatgtagtcattagactgaaagaattcctagttttgaatcattcacacattcctggaaccacctacctgattgtgtagccttcttttgatgtactgctgttctatttgttaataatttatttagaaaatttgcatatatatctgttagtaaatttggcctacatagcttttgttcttgttgctctactagctgtattggatgttggtattaaggctatattgattttataaaatgagctagggagatttcctttccacccctatgagttggcatcattaaaataagtattatctattcttccaacatcactatcagtttaaaatcaatatgggcctgatgctttttaaatggttaagttttgtcatctttccaaatgcttataaaggttttgtttttgtttttgttttttagtcaagtttctttttctttgtggtcaaatgctgtagatgcattagtccggatgggttatgctaagctgaagtaacaaaacatgcaatctcagaagcttaacacagtaaaaatttatttctagttcacatcacagtctgagatgggtcgtcaaagagccatccttcaacttatagctatgctatccggaatattctaaaatcatcattaaaaagggctaaagggatgagcaggctatgtttaggtcctaggccctgaaagtaccctgtatcacttgtatattctcacatctttcaccagatcccttcctcatggtcttagcctaataatgaggcgcctcagtgcctgtaagaagaaagagtgagaaaatgaaatagcatctctctaccatataagttatattttgccaggaaattatctagttcccctagattttaaaattcattgccatataattgatgacagtggtgggccatctggagcagcggctgccatcatgccagctgcaggggggaggcgtgagtggtggcagcaggaatggctgtgggagcagcggtggtggtggtgggtcccctgtgccctgtatcccaaggcagccaactgcaccacccccacccttgcatgattgggcagggccagctcctaggtccagagcctctaccgcagcctcaacctcactcctccactgtgtcccaggggcccgcagcaccttgctgaaggcgaagctggggcccgcggggcccaccctgggagcatgaggtggtttctttgtacaaggttggccagggatgccatcctgggagctgctgcaatggggctgggctgagttgcccaccagcagtggagcagtgcagtcgggcatgggggtgcaggcagagagggtccctgaggtgaagctgggcccagggcgatgctgtgctccatggagctggtgggagtgaggaggaggtaggaggccccctcctggcatggctgtagccacccaggttgcggctgtggacctaggcatctctgcactgtcaggtggccccgggaaggtactcccttgcccctgaaggctcggaagtatctgttcctgctgcctggcctctcctcactgtcagtgcccactcagatcatggagcaaatttgaggccaatcccgggtgccgtggcaacctggtcggatgtgtgcacactgggagcagcactgacataccaggcaccagccacctcggccccctccagactttgcgcaccagtgagcacaggagagaggccaagggggtgctgaaggcagcttgattctggcttgcaggcaccccttggcacaaacagcctgggcaccatgaagagcagcaggaggcagacaggggcagaaggagcaggtccctggtgaagccccaccttcaaaccagggaagacctgaagcctcggggctaggcttctggtcccgtggggaccagagtgggaaactgtggtgccttttctgggcccgcccttggatgcccatggaccaattggtgcacacttcctcccctctgaggcccataaaagtcctagactcggccagactcaagaaggcaatgggaggaccagctgcagagaggaactgcccacctcagggtctcctctctgctgagagctgaggagatgacagaatgaccagctgcagatgggagctaccctctctgctaagagctggatactcattgggaggaactgcctagcagagaggagctaccccctctgctgagagctgaacactcatgggggcaccttggctatggagaggagcgggtctcctctgagctgttctattctcagtaaagctcctctttgtcttgctcaccctccagttgtctatgtacctcattcttccctgatgcaggacaagaatttgggacccattcagcagggctaaaagagctgcaacacaaacaaggctgagagactccccttgcctgccacgttgcgggtgtcaaggagagaagagacaaggagggaagagctgtggcccttcaggtatcccagacctaggagctcctggagccagggctgtgaaaccctctttagggctctgcggttcctggcgtctccaagcttccgggtgccacaatcacattccccagtgtcagctgtggaagctgatttatggtactcctggtccagctgcagcctccccgggagctggtgcccaggccagcacctggagctgcccacaccaccgcagccagtgtgcctggctgtgcacagtggccggaccccacactcgctcacgcaccccctcacctctcagtgcctggcttgcccttggcaggtgtgggatccaggccggtagtggggtctaggccagtagcaggagccaagggcaggctgccaggccgagtgggcggaatgagttcagcaggccagagcaaaactcagtcaaaggtgcacccaccggccatagaggtttcaggctggcagagtgacaccgcgaagatcccagaattgtgtataatgtataatcattttaattgtatccctatctcaaattatatcttctttgtcattcttaattttgtatagtttttttctcttttttccccttatctggcttacctgacatctgtctattggtctttgtactattccaaataaatgaattagtggcgataagcaaaagaaagttcctgctcccataaaatttttatcctcctgcttttgttcaatctattttgttgtttcttatataaatcagatgacttttaattttttttttttttgagacggagttttgctcttgttgtccaagcaggagtgcaatggcaccatctcgcctcactgcagcctccgcctcccaggttcaagcgatcctcctgcctcagcctcctgagtagctgggattacaggcacccgccaccatgcctggctaatttttgtatttttagtagagacggggtttcaccatgttgaccaggctggtctcgagctcctgaactcatgatctgcccacctcagcctcccaaagtactgggattacaggtgtgagccaccgcgctggccttaaattttttttttaatttttaataaaaactttgaattttataaaatttattccagccttaatgtattccataggttttggtcttaacagttctcattttctttcctttttagatcactattttcctttggttttgatgttttgattttctctttaatttaggattttaaaaataaaatggcacattttcatttccaaggaattaaattttttgatgattatatcttttttatgttgaattattatcagataatgtggcctgtaaagtttctactttttagaattgatttaatgttttctttgtggccaagaacacgattgattcttctaatgttccacagatttcagtacagaatatatgttctctgatggaagacatagttttatacaccttgtagattgtactattaaaataatctatgttcttatttattatttatctacttgatctatcaaattctagaaaaagtatattaaattatttcactatatttctttaaagatctagctgcacttatagaacctttgtacgtatttgatgactacactattttgtgcattaaattttatgcgtaatctatggaaaaaaactttcttgagtctaggtgaactgcatctctcaccattaaacaatgcctctctcagttctgtttaatgtttttggccttgttgcttattgatattttcacacctgcattcttttttttttttctttttttttttttttttgagacagggtctcactctgtcacccaggctggagtgcggtggcctgatcttggctcactgcagcctccggctctcaggttccagtgattctcctgcctcagcctcccgagtacttgggattacaggcgcacaccactgcgcccagctaatttttatatttttagtagaagcggggtttcaccatgatggccatgctggtctcaaactcttgacctcaagtaatctgcccgcctcagcctcccaaagtgctgggattacaggtgtgagccaccgcacctggcccatagctgctttctatttgcctgttttgctggtacaggttgaacacccctaatctggaaattcaaaatatgaaatgctccaaaatctgaaaattttgagtgccaacatgatgccaaagtggaaaattccacacctgacctcatgtgtgggttgcagtcaaaacgcaggcaaacgatgaagatgacattgttaacactgcagaaaaagtgcctatagatgacatggtgaaaatgtgtgatggacttattgaaagaatagagaagcatgcattcatagagaacagggcattatgtcagttcataaactcaaagagacttctaaaacaaaaactgttattaatgaggcagatgactctggagcagacattttaaaaagccatctggcagaacacctccttatccacagaggacccacttctaggccctcacctgcctctgatgtttattctcacctaaaacagaagaagaatgcagtgtacaacaacctttaatcaaaacacagcattttagttgcagttgcagactgaaagcctgccatagtttgttgttgctgttgtttacagctgaaacagatattccatgctgcttagttaccctgaacacattagtttttcactgtattaatggtaggtcatattttttagtgttaagtacttgcttgtgaataaatgtaagaaaatgattgcttattggtagcatatacattcagagtcaggagtgatggtgttgccagacaaccacagattgtccacatgtatggctgagatagtaacatcttccctttctgatggttgaatgtacacgaactttgtttcatgcacaaaattatttaaaatattgtataaaattaccttcaggctatgtatataaggtgtacatgaagcataaatgaattctgtgtttagaattggttgttgttcccaagatatctcattatgtatatgcaaatattccaaaatctgaaaaaataggaaatccaaaacacttcttgtcctaagcattttggatacagggtactcaatctgtgtatctttgctcacgtattcattttcaatgattctttgctactttattttagatgagtgtcatttcaaaatcattttgtggtttggccgggttaaaaaatgtagtgagaactgatatactctattttattccttccattatattatatgttttctttatttttattatgctgttgctgtgttttctcccattattacttcttctgcttatgtcaatttttccttcgttgctttttcaaatttggtaatttgaaatttcttctctcttttaaattcttcttgtggttaaatctacagttaaatctattcttatctattataatatcagaatataataacaactatattgaatcctatatattttatttgttcatgtctcttctccccgtacctgaaaattacaatgtttttacttcttcactctcctgcatactctattctttctgtcttgcagttttttattcttaaacttcaagaatttcaataatacccaaagtctatctgggcagtaagtggggacattcacagagctcacctcctttggttcctttctctcagtgctgattgttgttggacacatgttgactagttttctagttatttaatgtgggagggtaaatctagtccttctaattacaacattgccagaagggaaagtttgtttgtctctttttaaagtaaccttttgtaaaatttggtgagctctattaatttgtatcctcaagtctcttgctactcaggggaatttcctctcatgatttaattttttccttccaatttgcctcctctggagttccagaaggagctgcacatgtcgaattaatccctcgttgggtctcctagatccatcctgctcttctctttttccttattaattccacctcttggtattttgctctgtgatctgacatcttttccctatggaatttctgcactactaatttgcttctcaacagtaaatgtagccttaggtgagttgtttgcctgatcttggttttgggttccctcagcacccatgcacacccaggctgttaggtctggggagcatcaggtggtgtgaggcagagcagaatccttctgtcctggaaaagcagcaaatgacttctttatagactgtgaaaaataaagggcaatgttcgatggctgtcattttggaagcattgatttcttcccaaagtcccactgtgtacagtattatgccattaatttctgtacatccttctatcccagatttcctcgaattgtgtttggcattctgcttctgaagattccagaatcactccctcactcaacacgtatctattgagcatctgcttttcgccaggcactattttagtgactagggaaatgcctatgaacaaaaaccttgctctgctgacacttaccatctaaaagggagagacagaaaataaacaaaacaatgtatacttggaggtgtatggtaagtcccatgaaggcagataagcaaggtaaggggaatgggcatgtgggatctgtcatgctatttaatttaggagggtcagggagagcttcctttagtagggtcctgaaagaagtgggggtggggagcgatgtggattttgaagaaaaaactttcaggccgggcacagtggctcacgcctataatcccagcactttgggaggctgagacaggtggatcacttgaggtcaggggttcgagaccagcacagccaacatggtgaaaccctgtctctactaaaaatacaaaactgagctgggtttggtgtctggtgcctgtaatcccagctactcgggaggctgaggcaagagaatcacttgaacccaggagacggaggttgtagtgagctgagatcatgccactgcactccaggctggcaacagagtgagtctccatctcaaaaaaaaaaaagaaaaagaaaaaaaaactttcaaatggaggcagcagcaaattgcatgaccctgcagtgaaaactgcaaggaaacccggagggttagagcagatgagcaaggcagaaagtggtgaaggtgaaggcagagaagtagctgcagacagagaagtagctacagacaaagaatgcaaggtatgctcaaccccggcacacattaggtccacctttggagctccacctagagagagtatgatttaattggtctagggtgaggtccagtcatggatatctttttgaaaactccccagatgattcatatgtacagttggggtttaggtcctatgatgtatggacttttcagaaaaagtaaagctttagattttgttctctggattaagtaagaaaataggctctgagtaaagaacaaataagtgtcatgtgggataagtattgtgaagagaaacaaagccagtaataggggtaatgaggaatgaaagtgccagagaaggttttattttaggggaagtagtcagtggaagactatcaattctagtgataaaaattttcacagtagccgaaaagtggaaaaacccaaatgtccatcaacagatgaacatataaacaaaatgtggtatatatatccaatggaatattattcagccttaaaaaggaaggaaattctaacatattacaacacagatgaatcttgaaaatattatgttaaatgaaataaaccagtcataaaagtgcaaatattgtatgatcccacttacatgaggtgcctagaataattaaattcatagggacagaaagtagaatagtaggaccagaggctggggattgaggaatgggagttactgtttaacgggtacagtttcaacttgggattataaagaaagtctggaaatggatgatgatgatggttgcgcaacaatgtgaatgtgcttactgccactgaactgcacccctaaaaatggttaaaatggtaaattttcttatatctattttacctgtatatacattttatatatatataattaacatagagtatatgggaattctttgtactttgttttgattttgctatgaacctaaaatttttctaaaaaataaagtctatttttaaaaaagaaaatttatccaaactttaggttgtttttggcaaaatatatacaactgaggaccacaaaggacagaaatatatgtaggaagaagcttagctactctgaaacaattaactggaaaaaagaacaaaggaaagtaattatgcagttacatagtcattcaaggctactggacattgtttgagggagataatgtcagatccctggtatgaatgaaaagaagagtgggattagaacatgttttcctgctagcctgcaaagttcactctcagtatgtcttgactattaggactctgcatgattcatattaggtcttgacagcagtaggccctgataattctaatgtctgtataagcagaattccactgggtgggagcagaaaacaaggctattcctctgccccttcaaaccaattcttagcttttgctgtgactcaagtcatttttagtcaccagagcaacccattttagtaaacaaaatgtgcagttcaatgtaacacatttccaagcttcatttaaagttagaacttctccctgaccccagcctggacccactgggtcacagaggcttccaatctcctgccttccttctcctttcctttgcccttactgagttgcaggctgagaatgacgagaggtagaagaggtaagggacagggcggaccctgctggaccagcagtgatgtcatcaggtcctggttcccaggcttggagcagattcccagagctgattcttcctctgatggaatgattccatggattccttaaagatgctcctcactggaggcctccctctgcagtcccctagatataagcaatgcctctaattgacaggctacatatacataatccctttgcccctgcacaccactggaattcccttccaggcagtgctcttgaacttgattcaacagggctccaagccagattcttcctatgtggcctaagtctagttgagtccaagaaccactacacactcctgccacccttgctgagcaagcagtgcactcacagtacagacctttcccactcctttgctctgccatcttgggctactctagctagaacttctccaccagccctcatgctccccaacttcaggaagcatagg

SEQ ID NO: 499 - DNA, 20001 bp, Homo sapiens
aggcatccccatcagtccatccaaggaatctctctggaacacagctcctgatctaggtcccgaacatctgatgtcctgggtcctccaaggttgctcctgatttacatttctggcctcacctgcactgccccaatgccctttagacttgtctgggtaagaggttgttcctctggcctcccagccaccaactttgcattttcttgcttctgggcctttgctagtgtcattcccaggacctcgaactcccctccagctctgcgtactgagattcctggccatctgtctccatgctcctggagcaagcctttcctgattcccacccctgaagatggctccctcttctgggctctagtagcaccctctgtctgcaccacatgtttggcatttatagtttattaataattcagcagcaaatattctttcagctcttactgcatcctgggcccagctttgggtccctgcttttgtggagttttcagtcctgtggggggacatgaatgtgcactggtgatttcgggagtgcagagaggaagaatggggagtgttaacaggggtggcagccaggagaagtgaccctgagtgaggggcccagatgctgaaacctgaggatgagtagcgagaagatgggaaagagcaccctgggcaggaaatggcacttgcaaaggcccagaggcaggcagggcaaggcaggacctggagaagcccatcttgcttggagtataagagcaggagggggacaagacaagaggggcgaggtcagcagagaccccgcaggcagcagggcgttggtgcctgagccagccttcctggagccctgtccctgccttccctgtcacagcttggtgctgctccttcctctccaaaacactttccaggtcagtcttcctcacattttaacgtgcatcgagtagcctggggagcggggctgcaggactgtgcatttgtttttgtttgttatgtttttgagacggagtctccctctgtcacccaggctggagtgcaatggcacgatctcagctcattgcaacctctgcctcccaggttcaagtgattctcctgcctcaacctgccaagtagctgggactacaggtgcatgccagcacacccggctaatttttgtggttttagtagagacgaggttttgccatgttggccaggctgtcctccaactcttgacctcaagtgatgatcctcctgcctcggcctcccaaagtgctgggattacaggcgtgagccactgcacccggccaggactgtgcatttttaacaagcatctggtgctgctggtgcggcatcctcggaccacactttgaggacaaggggctgtagcccttggcttctggggcattgtgctctccccgatctccccctccctccttggctggcttctcctactctcctgacctctaagtgtgaaggggcccagggtcaggcctcaggttccccttccttccccatgtccacccgttcccattccacccttcccacagtggcttcccccactttacagcttccaggccacatatcaaaaatatcccctgctccatggttgctctccacccccttaacctgcctggtttgtacctttaccccatacttggcatattatatgttcatttactgtctgtttcttccctctggaatttgagttgctgaggacaggggctcggtctctttattctggtgcctggaatggtgtcctgggcccatggtgggcacctggtgactctcagccgaatgagaagtgaatgtgttcagggcaagggtcagaagggggctggccaggagagtaactggactggttctgcttttggtagtggctctgtggctgcgggtgcaaggcaggcatggtggggtgggtgtggaggcagagtgggaggaagccgttcagaggctgtcatggtcatcaagagggaggaggtggtgggctggagagaaggggatggggggatgagtgggagggagcaccaatagggcttgttggtggtttgatggggagcagggaggagtcctgggaaaccagaggcttctggcccgggcggctgtgcggggagcccccgagtttgccatgctcctgtctgggagcagcacggtggctgccacttgaatctgggctgtgcatcaccttggctaagtttcttcgttcctccatgtttcagtttgataaaatggagatgacagtagaagtctccccataactggtgggcgggggcgggggtggctcacccttgtcgtgcaaagcagcattagccagagtttcagccaagatggggtaatggggcccaggcttgccctcctgcttgaaggtgacaccagtgatgaaggaaagcactcctcaagccatgggggagagacaaggagggccctgtggtggccccagctccctccagctggaatcccaggctatggtgcagggagctcaggtgcagcccgctgctctccctgagttgcagagagagatgatagcccaaggaggccaaagtagccggaggtcacaggacacagaactggggaggagcctgctgctccgtgggggaccgtggagccacagggctctgcagagggtcccccatgagtagctggctgaacagtgactcaaatgtgagcaaaactacctgaggccagagaaagaactagctgataggattccagggaacaatatttgaagctctcacaggtccagaaatagttcctcttcccaccaatcagggaaggttctaattcatgaagcactgggtagagctgctctagacttgcctaacaaagcttaaaagcaaggcctgaaaggatcaaactatttcccaataactgagctgcatcccagaacagacatcacaaatatgtattgcaatataacaatgaagtggaattcaaaatatctggcatccagtaacaaattacctggcatggaaagaagcagaaaaatacaaaccacagtgaacagaaaatcaattcattggaactaaccccgaagtggcacagatgatagaattaggagacaagggtattaaaatagttattaactgtagcttatatgttcaaaacaccagaggaaaacttgagcatatgaagtagagacatagaagataggaaaaagaaccaaccgaacttctagagatgaaaacatgacaatgcctaagatgaaaaatgcagtggatggaattaacctcagactagatattacagaagaaaacattagtgaacttgcagagagcaatagaagggatccaaagtgaaatagagagaaaaacatcaataaacgaaaaaaacaaacagaactcagtgaggtgtggagaagttcaaggggtctaatatacgtataactggaatctccaaagaagttggagctggtgcaaaaaacaattagaataaataaatattggctgaaaaatttccaaattggatgatattataaacccacagatccaaaaagctcaacaaaccacaaacacaagaaacaagaagaaaacaacaccagggaacattataatcaaattgcttaaaaccagcaacgaagggaaaaatctaaacacagagccaagggctgcatgacctacaagggctcgaaggtaagaatgacagcagactccttgctggagacaatgagagccaggagacaatggagtggtgcctttcgagtgctaaaaaaaaagaaggccgtcaacctggaacgtgcaatccagaaaaagaaaaaaaacccttccaaaatgaaggggagatgaagagcagcatttacactgtctcctcttctagacttgtccaggggacagggctcaaagctcagctccttctcagacacacaggtctggacctaccactgtggattctgattttctcactgggtttgggtcccaacctgagccatggtgacaacatctaagtggccagtctggggctccctgctcagccttcaatctcacaaaacccagcttcgaggcctccctgggagccaggcggcgggaggtattttgctcctgggggactgggtggagtcgggcttgtcttgttagaggcagggttgaggagacagcagctcctcaggggctctccccctggggaccccagtcccttgggcccaggcccttctgagcgagcatggggtggaacaaggcacagggtggggtgtgaggcatgttctgcacaccaaccctgaaccgtatgcatccttacccatcaacacaggagtgtgaaacaaaagagaagtgcatttgaaaaaaaaaaaacaacaaaccaaaaaatatataatgtctattttagctgttcacaaggttacaggcagtttccatggctacagctgtgtgctgcgtgtgctggggtgaggaggtggggctcttcttaacccaacagttggggcacttagataatttcggcccaggagccaggcacccgctgctggtgggagagagggagggagggagggagggagagagggaccgctttcccaggactgtgatgtcagtggtgaattagaataacgcactcatgctccttggcacactgtagttttggctgagtttttgggtctatatctccccagagagagcagcctgagagttagagacaggagtcctcatcttatttcacaggtggagcactggggacagggacctgaggcaccagcaaacaggtggcaaatgaacacctgagctgctggttcatgtgcctgtcccccagggctcctttcagtggcccctctcaggctgctcagaacaaaggtggcctgagatccctgccctcatcagggagagcccagggcagatggaggggaaggatgccagcctgcccctgctggatgcaggcagcaccccctcccccaggggccctccccccttccctgtgagtggcccttgcacccctgccctgggggcaccttccacctggcctgagcgccacactttcagctttgtctcccaccctcctcctgtcctgcctctgggctccagccattctcgcctttaaatgcctcacctgcacagagttcgcctctgcctcctggcctttgcacacactgctccatcgactcggaactgccatccactccttgcatggtcaggtcaggctgctgctcagctctcagctcagacgtgacttcagggaagctttgctgctcgcccaggcctcctctgggctccccttcccagcacatggtgctgcattgtgccacaaagggaacctgggtcccgggaccccactgcaagcccgacagcagctgaagcctgtgtctgtgtgtttgcatctgtgtgtgtctgtgtatctgtgtctgtgggtatctgtgtctatgtgtgtcaatgtgtaaggggtgtgtgtatgtgtgcatgcatatgtatgtgtctgtgtgcatgtgttgagtgtgtgcatgtgtttctgtgtatgcatgtatgtgtccgtgtgcatgtgtgaatgtgtgtgtgcatgtatctgcatgcatgtatgtgtaagtgtgcatgtgttagttgtgtctgtgtatatgtgtgcatatgtgtcagtgtgcatgtgtatctgtgcatgtgtgagcatgtgcatgtgtgtctgtgtgcatgtgtgtggtctgtatgcatgtacaagtgtgtttttgtctgtgcgtgtgtgtgcatgtgatctgtgtgcatgtgtgtatatgtgcatgaatgtgtgtctgtgtacgagtgtgtgtgcatgtgtgtgctagtgtgtctgtgtgcatgcatatgcatgtgcaagtgtgggtgtggtctgtgtgcatgtgtgtgagtgtggtctatgtgcatatgtgtgtgcgtgtgtgcatgtgtgtgtgtctgtgtgcatatgcgaatgtgtgtgtgtggcctgtgtgcatttgtgtgcatgtatgtgtggtctgtgtggatgtgtgtgagtttgtgtgtgcatgtgtgtgtgtctgtgtgcatgtgtgcctctgaatgtgtgtggtctatgtgtatgtgtgtctgtgtgcgtgtgtgaatgtatgtgtgcatgagtgtgagtctgtgtgcatgtgtatgtgggaatgtggtctgtgtgagtgtgtgtgtgtgggggggaatgtggtctgtgtgcatgtgtgtgagtgtggtctgtgtgtgtgtgtgtgtgtgtgtgtgtgtgtgtgtgtagtgctgagagtggatgaagagcagcatgcaggtgcaaaggtagagtccagcagcctggcccatcccaaagagactggctggcccacacggcagccggggcaggggcgtgtgccacagtacccctgtttccctgtggtgccacccactctcagtttagtggagcccaggtcacctggcacttacgagggaagccccagatggcccctgcagctgggcctctagattcctgcagttcatttaaagctgggcccagcttgttccctggagctttcgatggggtctgcagtgggatggggtgggagcaggggtaaaaccagagggtaaaaggatgggtggaagcccaagactcgtggggcttgaggagaggttggtctaagctcctggagtcgcaggctcccagaatcttaaagccacattttagagtcttaaaaatcagaacatgcaaccagtggctgctcagaatctgagactcctttcctcttcgattcggaagggactttggaagataactagtgtaatcgcaagctcagtgaacaatcacagacgctccctaaccccctttcccctcgcaaataacaattcatccaaggccattaactcaactctcccttggtagggggtagggggggagcttcattgcctcgagttcctggctgaactccagacattttgctcttccctgacatcagcccaagttctctcccaagtaccagccatgaggacccctgggagggccctacccgcctgcaagctctctgggagcagggcctcagagggcagcagagcctgtgagctgacaacccttcttccatccctcactctactcactcctcctggagccctgaacacccactgccccatactaggcacaggggttacaaagatccactgggcccccttcctgagcctctgagctctctgggcagggcgcgcctttggagccgactcagtgattctattataacttgtgcaggtaactctgctgccctgagcagtctttgaccaaggcttcagcaaagaccctgcctggagcaattttttaacattaattctcctttttaaatagattgggctcagccatttttaaacgagtggaggtgtgctgttgaaagggtctgtcttgcaggtgagaggattttttagaaactggtcatgctgtcaatacaaatagcagcattaaccacaggggcctggccaggcgagacccactctctctggagttcccttccgattactgaaacccccataactggagaatttcgggtgccacatgggtcagacgcagctaccccccggactgctcctacacgctggcttgcttcccatttctggaacactgcaagtcccttcttccctgaggatgttttgctggttttgaatgttttgagtgaagaccctgatgggaaaccagacgccatctctgtccctaatcatggggtgtcttggtctgggggagccacagccacacaaaaccaccagccatctgaccaccatggcgtcagggcgcgtctcagaaggcttgactaaagctgggacctggcactggccaggaggtccttcaggcagcgaggggggtaggtgggaggagcctcagggaggaagggactctgagggttcgagaaacaggcagtagccagcacacaggagtgctgcagggaggaccagcagggaagctgggggctggcagggtctgtcctgggtggggctccacgggccgcaccggggctgggttctatcctcagctgggaatggttttaagcagggtttgaaccctgccccccgcccccccaaacacacacacacagagctttagcattgccgcaggggccacttggcaggccctgcctccagccatgcccaagacccgccatataacaacaagttccatctgccacacttctacctgggtctgggatctccggtggatgacgacggatgagttctcatcaccctgcaagtgggaaagagccaggcccatgttcatagaccaggaaactagggcacagagaggtttagtaatgtgcctacgcttaccagctggaagagttcgaatccgggtgggattgagctgtggggtcccacgcttgcgactgttcagagcatctggctggttctgtggacgtccctccctgctcctccctccccctgcttccctccaccaatgctaacccctcctcttctggcagctgggcaatgatgagcgctcccaggaagagaagggccagcagcgaacaggacggctcagcccaggggtgacagaaaagaccacacgagtgattgttcaagactctgtgttggaaaacagtttttttttttaaatagagatctgttcagtaattagagggaactctcatgtgggaagttccatgaaggtaaaattaaagttgactacatttttaattttgtaaatgggttcacaccaaggcaggaggcttctgcataatgagtctttaaccaaacaaactctaaacacaagtaaataccagaagctcacagtcgacaatgttgcagagaagctgatatttttctagtaaaatattggacgcttttttctgccttcctttgaaccagaatcgaatcattatatcccagaatcagccctcttaaagcagtggctagttttgaaccgttgagaagggagacctgagataggattctggccctaaatgtgggccctcctttcagctgagtctgctggactccagggcggagggggggccagcccaagaggttggcccagggagaaagggcacctggggtgggcaggtgctcgccttcggattgggaaaatgaacatctttatgttgccttaggaaagttccctaatgaatcaagtgagactgcaattgccaacgccaactggaggacttgaaaacaggatgtaaacatgacatttcaaacacaaaggtgaggcccttgacaaatgctacagagaaaccactgatgcacccaggcgcctcctcccctactgctgtgggtccaatgcatacccagcgcatcccaccgcagccggccttttcctccagggcctcagatcgctcttggcaaaataatcagagctaacgctagggggatgtgttggtaggaaccgcagagggtctgcacggctggtgaaccaagtggagaccagggggtgagaggtggcctacagcacgtgggaaaagcaaccccagccacaatccagcttggaaagctaaaagccaatgagatgacagggaagtggcccagcctgttctctcccacccgcaaagggagaagaggaaattcaggggcatctttagcggggccactgctcattagccaaagttgacagactagtcctcctgcctcctggtgatgataggagcccgcatgtctgtgccacaccagctccttcctgctccatgctaatccttcagggcttagctcaagcaccacctccaggaagccttccctgcctgctccagcccagggtgtacattcctttgaatctggggcacctgctaccttgcacccatcttctaatccatggacagctgcttttgcattgctatttcttttcttttctttttttgggggagggggcagagtctcactctgtcacccaggctgtagtgcagtggtgtgatcttggctcactgtaacctccgccttccaggttcaagcaattctcatgcctcagcctcccgagtagctgggattacaggcgcatgccaccacgcccggctctcttttttgtatttttattagagatggggtttcaccatgttggccaggctggtctcaaactcctgacctcaagtaatccgcctgccttagcctcccaaagtgctgggattataggcatgggccactgcgcctggcctatttatttctattcacactgcacatccctcatccaactatgaaatccttccctggagtgattacttgagtgaacaagtatataaaatgaacacacacaaaaaataaaacctgtggatggcctacatgactgtttactgatatgggtccaggtaaatcaatgacagactagggtgtcgacatgcagacacaaccaagacctgttaagtcaaaaggacagggaacaacacacacagactggtctctcggtggtgcccagtgtggctgacacacacgtcactgacacagccgagcactggggggcaggccacacccaggaaaccgggggcttttactttgtaaaaaaccagccaaccaaccaaccaacaaaagctgaatagcttggtttttctcttactgcaagcatgtatttcttttattcaaacaccctttaatatatgaagttaaatatataaggagcatgaaggagacagtcacccttgctttatgcaaatagaacctcttttctgccgtggtgggcggtgagtctcaaactccacggaacacaggaatcacctgggggccggttacaacaggtctgggggcctgggaacctgcatttctcacgggttcctagggatgctgctgctgctgctgctggtccccgaaccccatctggagtagcacgatttcagattgatgtctataaggtagtgcagccagatacagcaaatgcaaattaggatgatttcaaaagagagaggacggttctccagagacccgggacctgccagcaggcccagctcccagacagggccagcctgttgcacacagaaactgtggacctcctcgtgaggaacggagatggaggtggcgatgatcctgcctgtgtgtgaacactgaggtcaggagccaaggctgccccacgatgtggggtttgcctgcttgccaggtgcagaccgaggcctgtgggccccgaggccaccttacggcagagccaggaagtgagcacgggtcggggctgcgtggggtggagctggcctggaagaggttttcgctagggctcttctcccagtctgctggctgggaggtaagctggcacatcagaggcggatgtaatgattgccattttatgaatgaagaacctggggcccagagaggctgagtaacctcacgagggacgcatagcttggatggaaacacggctctgctgagctacagaagctgtgctcttgtccactcagccacactgccaccctcagtagccagggaatgtggtggacgaggtggcagccctgggagcctggtttgttttggggtctctgtcccagtccctgcccagcctccaccggagctccctagctggtgcagccttcttccacctctgccacctgggaaaactgagctcaagggcagaggtgactagctcggtccggcagggacccactcccacaggcacggacggctccccgagggctgagagcgcccagagcacaggcggtaacatccagcccagtgggatgatggctctgacactgagctgctgctgaaacaacagtcctcccccagggccccggggccgcaacctcactgcctacgtgcggcccatcccgagcgtccggcgctgcctgagcctgacttaagggagtggtataggagtgacatttgggcagtctcaggccgtctcccatcaccccaacacaaacatccagccctcaacatgcttgtcacttgccctcttcttaccaccctggtccaggcctccatcatttcccttcctccccagcttcctgcctgcagggccccctctccaagtcattccccatggtgcagccagagagggtccctaaagggcagagcgaaccatgtccctccgggctcccagagcctggttcctgtggactgcggcggaaagcccaaccactgagcagggcttacaagcctggcggaaccggaccccacctgactctccagcctcctccttcactgatgaggcccgagggaaggaggaggcacagtctccattttccagcccaagaccttcaggcccagggttccacagccagaaagcagcaaagctgggctttcaactctacctccaccagcccacttcaccccaggggcaacaggattccttcccctctccagcaacccccagcaagcggggattgggccaaggcctgcgggaggattcagcaacggagggagggagctggcaaacactgaggcctcggaactcatcaaatcccctctggagcagatccagaaagactgagacactgcaagaagtaccagtgccaagtgtggcagcagctggcagagaagccccccagccccaccctggcctctgtagggtggtccccaggaccacatgctcttggcatccaaaagccttttggccaggctcacggttgccccggtgtcccatgtgccagcagggaaggcaggagcaccctcatttttgcagatggggatgcggaatgatgcacccgtggtctggcctggaaaccactctctctgccacacaaattgccattttaccaacacacagatcaggacttgctactctgaagagggaagtggcggtagggccaggagcggagtggaggacagaacaagggctcggctgctgctctgcctcccctcctgccccgagagtttagagtcagaggtaattgactgagatgtaatacatctctcccctcccgagtgctgtaattattcctcgctggagcccgctgccatgaggctgcagaggcaggcccacgtggcaggagccagaggtctcactgcaggagtgggtctccatgctgtgaagcctcacccagaaccagcaccagaaaagtcaggaatatagagccagcccctaaatatacaaaacgggggtgatcatgtgagtagggagtagggttggcacggactgggggcttggactcaggtcagtccgaagatttcaaaactgctctgcactccctcaataccatggcaaaaagggaggaactgcactcctcccagctttcctactccatccggggcttagatgaacagagctgtaatggctcagaggggggacatgaaatgatccaccccacaattttgtacatgggagactgaggtctagagaggaaagtgacttgcccaaggtcacccaaaaaggtggacagaactcgagtcccgacttctccatctgtgcccacctttccccaggtgcccttgctcatgtttgctgatggtactggcatgacagacgtgtgttggggactccagcctcaagggtaggaggagctctgtggggctccttgccctacctgctggagaggcgagggtggagaagctgcaacacctctgtgtgccaggattctgagtggtgtcagcacgtcctgagagtccagcaatgcaccctggagctcccactccctccccatgcaagtggggcactgaggctgggagagcctgtgcatccttcccagacccccagatccttcgggagccatttccaagctttccggctgagtctagacaagccggccccattggaaactcagctgatagggaaaccaaaacccagctggatccaggatacaaagactgccctgtgggtcttttcatagcatcgtgcagatgctcaacaaactgccagcaagtgcaagaccgaatgaacaaaaccccacatttcctgggcccccgagccttagggtgagattttttcacaagctgccagcacctaagctgtttaggaagcttgcagtcagtgcaccaagagttaaaaccagcccttgcccagcccaggaagtgctggttctcacctgctcaggtgggtagagccctggtcacctccacttcactctcaattctataagagggagaaggtgggaagatgggcaaaggtgctttcccagcaaccctgaactttttgggggttggtaattactgctctccccagaagccctgaagagcgtgagttggcaggggctgagggaaatgcaagggagaaggctggcagggtggcccgctggctctcctgagctcctgcttactggggaaggtgctaggacgaatgctggggctcaggcctcaaggatactccccttaccctgcagaaggttccatgaacttgacccttgagtttcttgtctcagagccatcggggttgctacgggacacacactggcaggaccacttgtgcccaggcagtccgtggctgcgggaggacaggacacgagtggggtgagacagtggagccctgaggacccatgttgaatatctcttgggtttttggtgtgtagagtcttttcttttctggctgaggaaacctagtgtcagttaggcaaccccccacctgtcaatgaagcagagattcctaacagacaaaggtgtgaggtggtggtgacagaggccggcgtgtttgaggccatctccaccacttccccactctgtgatcgtgggcaagagaccaaacctctcggagactcagtttctgcatctgtgaaatggggccaatgcccctttctcgtgggtgttgggtgaatgggatgggatgaaaatgcagcaccgactctggaagaaggcaaagctcagcaaatgaaaaagtcttagctcctggcagggagagaaggcggccaggtttccagagggctcttctgggaaactttccctccccactgccccctgcccccaggccactgttccgagggaaatgaagccccccttcctaaagtgggtcccccacctctcccttaggccctcgtgcccacctgggtctcagtctcctcctcggggatgcgctttgagggtggaagccaggggatgggtgacgccagctgggtcaggggacctggtgcgaggcagccggggcaggctgcagtgggcactctggacgagtgggcacctagctggagctttccagcctgcgtcttctgccccacaccccgtgacccgcggcccgctcggcccttaccttgaagcatgggaaccgcgctgccccggccgcgaggacttgggcgcacgtgacggggcgggcgggcgtccgacccgggcagggcgcagctagcggcggccgctcatgcccaggccacggcggtggcgcctggtgtggctgggcgggcgaggcgggcgctgagaagcccgggaggcccccggggaggcgactgcgtgcccaggcgggcacccctgccagctccgcgctgcggccgcgactccggacgccccggctggctccctgcgagctgcacgcgcggctccagcctggtcccgagcgcagggcgcgcgctggcggggagggcgcgcgcccgagcctggcggggagcgcgcgtcaccggcccgcgcgcgcagtcgtcgggggatgccgggagcggcctggggagctgtccctggtgctgacggctcgtccgctctcgcccgggacgcgcgacctcctggaggcctgggggtgcccccaccctggccggcgccctgcggtgctccctccgctctccgcctgttctcggggcgttccggcttccacaacgttgggatctggagtcaggccgaagctgctgcttatccgcagtagggcaagtcccttatcctggttgagcggctggttcttatctttaaaatggggagttaacaccagcacctttagggttggtctgagaatgaaatccgatgatgtttcgaggcccggcacaccataagtacttaataaatgctcgcctttgttactatttatttcccttctctgagttagcaaccccggagcaactgagaggaggagcaaggcttacgctgctcctggtgagtggctgtttggggcatggcggctgcctttggatctctcccacatccacggggaaggggagcagatcccttctccctgaccccaaagcacagagctaagaccaatggctagacgttaaagcaaggcagatttgggctggatacgagggagacctttctgacccaaggctcctactcctgagaggagtgccccaggaggcatttccctgtttctgcaggtcctcgagctgagcctgcggtcgcagggaccctgaacggagagaaatctggtgttaagaatgttaggaaggcttttgtgttagaacatgtacagcactcagagctgtgcctggtgggaaagcaccatataaatgtgtgctttttttttttttttttttttttttttgagccatatcactctgtcacccgggctggagtgcagtggcgtgatctcagctcactgcaacctccacttcctgggttcaagtgattctcctgcctcagcctcccgagtagctgggactacaggcatgcgtcacgacacccaggttgttctttttgtatttttagtagagacggagttttgtcatgttggccaggctggtctcgaactcctgacctcaagtgatctgcccgcctcggcctcccaaagtgttgggattacaggtgtgagctgccacgcctggccttaaatgtgtgctttcattatgatcaacctttaagttctctataaaaaaactccatcctggtagtaaccataaccttgcttcattctagacatgagaatactgaggacaaacagaagagtaaagtgcttggagtccatttcccttttacagatgggctgagcacagatgggtgagcaacttgcccatggacaagagagtgagtgttcacaccatacagacatgctccaaatgtccagcctgctgcctcccctgctggggcccctggcaagggcccctgctgagtttctccaggctgatcaggtcactttgaccatagagagttttcttatagcaaaccaggctagtcctccttcctcttaactaatgggaaaagctggtccctgccccctgtgagtatcttgttctcttccaagcaggataattaaacatcacctgcttcatttcccaagggaccaggggctgtgtttgattcattaattaactgcgagtagtacctgctcccaccaggcacttgtctcatgataaacatcactcattatgtgcttaatgcgtgctagacacaaggctaaacacagtgcgagcattgcctcatttagtcttctcagcgatccgatgagatatggatactgtcattaccctgactttgcaggtgaaaactttaggctcaacagcagcagacctgaggcggatcggcctgattcccaagccattgctcctaatccccttcttctagaacttctacatccttcccaaccagccccacctagaaagaaggatggtaaacacggatagaaattccttataaggagagagagagaaaggcagaaagagagagagccaggaggaagagacaaaccagccagccaatcgatgtcctaggagttgacacaggaatcctttaaatcatcacttttagtcaaaaactccattatgacaactgagcaacttgttttttatttgagagttgcaagtgtgtgccaagaattttaaaagcaacatcactgccaagccctgtctttaccaaccagctcaatgcccttccacttctccccatgctgactttttactcaaactctgcagaatcctgcagctatagatctgagcagctggaaacctctgtggaaccagctcagactctgtagctcttggcctcttgacatgctggtttctttcccatgctgtggagagagatgtgttcctgatgcccgtgatgacgaaaccttatttaaaatggagcccattttatttgaaagaggtctgaatattacccacaatatgtacagtagatgcctgcattgccctcgctttacagatggtaacaaaggggtgaagtgacttggccaaggtcacacagccagcaaagaggtgactacactgaatagatttcatttggatcgcaatgccagatggtcaccaccaaactcattatttatgtgcaaaagcatgccctgattttaagcaaaaaccaatttcagaaaataaaaatgggtgaggggagagaaagacaaggaagagtctctggtctgactttataaaaacaattcatcatcaggattccctaaatagcaagttctcctggtgcgtgcaaaaaaaaggatcctagttacacgcagttcttttaggttggccaaaaacaggcccgggggtgggaggagtgacattctgccgccggactggttctccatccactacaataagctgtttagtcgcgtggcaacctcagccaacggcagctactctgtccccaccaccagcatcattccacaacagagcttcgtggatataactcaaattcaacagatggccaagttggttgaacacctcccaacacattggttcatgggtggcagtttacaaaggttcattttccacttagggcaaatggggcttgcgtaagatcagcctgacactatacaagcaggacctctgtgcgcatccgtttcttggagtcgagttggatagcctcattgctcaaagacttacagcctcatgaagaagaggcatcaggctttctttctctctgaggatctatatgtgcacaagaggtgctcattggctggatatagaggaaaaaacaaaaccagcggtggcggggaaaccctgacattccaatcacacctgcacccccatgcacagtcccctgcacactcgaatggagggaacgacgttcttgggaacaaaggatgtgagcagctgctgttgatggctgagtctcattctacagaggcagaaagaacaaagtgctcgaggaataaagtttctgccaggatgtggagagtaatgagaatgatggccaagagcttctcctattccctttctgggaaccctctggaagggaggagctcgccatctccagacatgtctgagcagaggctggctgtccacttgcagcacagctggcacccggggacccctcggtgttagaagtctgtgagattccagaaggggcagctgctcactggtctgtgtgggtgccccctggcccccagcaccgacctccattcagctgctcgatggatctcagggcactgaaagggggtccacgtccggttttccaagctcctcctcatattggtgccaggccaaactattgaagtggttgctgtttccacatatttatggaaattacctgggccttgccgcagttactagattaacctttgtttggtcgttgaattgtttcctcttcttagcctgcagccataagacgttctgcagttgattgactgagcccagcaacagcccctttgatccgttttcactgaacctgtgtccactcaactccagatgatctgtgcaggtcaagatcaagcccatttagagaagagatgaactttttaaaaagaaactattgagagatgggtaactgcaagtcactgtgattactctgtgatgccgaataggcagagtgtgcctcgcatcctgggtctgttagattggacgtcttttagatgggaccaggagaatgacgaggtaccaaagtgtgcaagagaaggtgagagggtcgggcagcagagtgtgccagcggacagagtgggaggcgtgcgcgggctcaggtgtgcagcgtgtggggtgtttccattgccctggtttgaaaagacagcctcatctgtgtgaaaagaaattaccggtggtttttaattactgcaacattttaaaacattgtgacagcaagcttgatgtgttcgttctttaagaatcatcgcagatgatggatgaggaggagatggggctgagaggcgctcggggacccgtcaaggggtctctcccggctccctctgtgaatcacggatcatcttgacaaatcctgctgcagagtgagaagaagtgagacaggagttatggaggatttattgtttcagagccttcctccattgcagggattttttactccagagaaacattaacagagagtactcctaatctgggttttactttctcagccaaagcacttcttcacagcttgagcaaataaatgcaggccatgcctacattcgttcattcattccctcacatactgtgggcgcagagacagaggaaagagtcctcgtcatcatgagctcagagggaggtgagagtttcaaaggttgatgggacagggcctcctgaggcaggcagaggcaggacagggacca

SEQ ID NO: 500 - DNA, 63944 bp, Homo sapiens
cccattggccacggtagtgtagatctttaaactttaaaacaaacaaacaaaaacctcatggtgtgctactgggccctggtagagaaaggatgtctgaatattaaatgccaagagactaagagcctagaatttctcctatgggctgggttctgtcagatataccaagttacaagattaggtgggcctaccaacgattcatccgaagaaggaagaggtatgcttttgattaagcatgagtagggctggtgtaccagtgtgatgcatgagcaggtagcactgatcccaatggcatctgccactgttgccccagacctcttagctgccatttatgattgtatcaccacctgagagaggaggaaaaaacctgagcacatccatatgtgagtgtatgtgggtgctagccaaaaatgggcaacacctgtgatacagcctcgctcaatgatggccttgaaagacattggcaaggaaaaacactttggttttggacagagttttggaccatgtacctggctgtccactttctatggaagaagaaatagtagatggtcaggccgtctacttagttagaggcctggaaagagaaagactggcatataggggacaaggagacagaagcatatgaatgggtacatgggagtgaggacaaagtgtgaagatatttgtatcacacattaatatccaccagaccaccagaaagcatctaccatggaagaggcaccgaagaaccaagttgacaaaatgactgagccagttgaccttagtcagccttcagtatcagacattccccaaactggcacaatgagcacatgaatggagtagacatggtgacagagatgaaggttgctgatatggtttggctgtgtccctacctaaatctcatcttgaattgtagctcccataattcctatgtgtcgtgggagggacctggtgggaggtaattgaatcatggggtgggtctttcccatgctgttcttgtgatagtgaataagtctcatgagatctgatggtttataaaagggagttcccctgcacatattctcttgcctgccatcatgtaagatgtcctcttgcttctcctttgccctctgccatgattgtgaggcctccccagccatgtggaacagtgactccattaaacctctttcctttataaattacccagttttgggtgtgtcttttttagcagcatgagaacagactaataccgttacacatgggcccaacagcatagactcccacttaagaaggttgatctaactcttgctgcctcctaatattcaatttatcagcaacagagacaaacactgagcccctactatggcactatttcttaaagagttctattggccaattggtggcaagttaactgtagtaagccctcattacctgggaaaatcagtggtttattcttacaagaatagtatgagttcacctttcctgtccacaggaccacagttagcactaccctctaagggctttggagtatttgattcatcaacatgaggtttcacacaacatcctattagaccaggagacccactttacagcacaatatgtgtgggagtgggacaatgaccataggatccactggttgtataacatccacaacctgctgacctaacagcattggaataacctgcagaaggcacagctaaagcaccagctcagggcaacatttagtgaggagtgggaaacttccttcaggatgccatagattgaacggaatcagaggcttctatttggtgctgtgaccccaacagaaagaatacacaagtctgggaaccaagaagtagaagcaaatgtgaccccacttattatggaataaatagtgtccctccacaattcatatgtggaattcctaatccacagtacattggatgtgaccatatttggagatacaatctttacaaaagcaattggccataatttaatatgactggtagctttgtaagaagaggaaatttggatacagatacacacagaggaataatgatgtaaagacacagagagaagatggccatctaccaaggagagcagcctggagcagatccttccctcactgccctcagaaggaaccaacctgctgactaaggcttctagccttgatctaagactttcagcctccagaactgttaaaaaaataaattcatgttctttgactcacccagtctattgtactttgttacagaagccctagcaatctaagataccacttatcactcacaagacccagtggaggacttcgcgtttccatccctgaaagtctgggctctgctgggttagaggctttgattccccagatgggaacaccttctccaggggacagaacaagagttgaattataagctacagcttccacctgggcactttggacttcttacttccagaaacaggtaggaagtgtaattgccttgacagaggcacttgaccctggttatcaggaagaaatagggctactgtcaaacagcagcatagaacccaagtaatctactgtgacatctcttggtggtcccttgcccatttgtgactataaatgaacagatagggcaacctctgcttgagaaggtgtcaaacccctcagggatgagggtcacagagatggtgactgagagtggggagactctagactggatagtggaggagggaaatggcatcaattgtggtcctgaaaccaactgtcatagcagaagctatcatttgtccagttaacttccttcacctgccttttttaaggttcccctcaggaagagaggcccactgactccactggttcctaggagacccgtgtcttgtatttgtctgaagtgaatccacatggcacagcggacaggccgatagacaggggagtgtgctaacccagatacctctccaaggaaggacatgcctagatttatgaagtacagtcagcagacagactcagctgcagagggctgcctcatgcgatgtgacactcttcccatatctggggactgagagagaggttgggcataatagctggtcattccagcttgttgctgggcaactctaacaggcaagactctctccagagctccttgccaaattagttgcaactctgttgagcctcacgtgtagttcaacttcttcctctccattgtgctgctttgccccccattccttttataagcattgatccataatagacaccttgcacccaaaagtccatttcaatgtctacttccacagaaccagcctgtgacagagtgaggaagctatatcctctgaggcacagctgaagctttgggtgattttctgaatagatctaatttcaaaatgtcaggaaagctctttttaaacatatcaaggcatgtcataaggtatcaggtgtagtagaatctattaagcttactctaggaggctctacaaagcaaaactagataggcccaatggaagggtatcacaggcagacagatttgggctcaatatagaaagagaatttcctggcatttcagattgcataaaaaataaaataaaacttccttgacatcaaatcctatcctggagaatgtgcagaggaaactgaatgcaccttggcagggcaatggtagcagagtttccggcaattgtagggggaacaggctggatgacctctgaacttgtggccaacgtggagactctctgggaacatgacatggcagttgatttcttttgtctttttttggcacacaaaagttacaacggtagcctatgccatctataaatttaaaacaatatagaagggtataaagtaaaacatcaaagtcttccatttcctccaccatcccaaatccactgctcagaagtgaccactcagagtattttacatgcaaccctccagacattcatctgattacctactatgtttcaggcactgtgctgtactttacatttattgattatttaaccccaatcttcaacaatcctgtaaagtaggtacaagcatccctgttttatagatgataaaactgaggcttagagaatggtgcatggttaggacatgcgataaagccaggagttaaaacagagtcagctctgtctgattctaactctgggctcctatacataactgctgcagatgaaatggagatgggggtagacataggcaaacattactatgacggttatttcttagtgaaagatcaatgatcctgaaacttttcaaattaccaatggccatacacaacttactgaaaatcaaaatatttatcacattccagtgacttatcaggttccaggaagccaccaggaatttctgccaccctgaccctcagggatctatttccaacagcagtgaccctgatcctcagggatccaattccagaaatctggagatttctgcttgtcagaagtacttaagcccagcttttggaaattcagattattctacagcagaagatttcaactctgactacactttaaaatcacctggtgaacatctgcaaattacctaggccagacctcatctcagcagttctgaattaattggactaggagagggtgtggacactgggattttataaaaaagtctcctccaattcgtttaatgtacagccatattgagaaccactggtttaaagcaataacaaggctctcaaacatggaaatcaccctgaggataaatcaatgctataggcatctggataaccttgggaaaacaggattcatataaaaagtagtacaggtgctgccatcctctactaataagccaggcacagaaagacaaactttgcattttcttacttatatgcggaagctaaaaaagtggatctcatgaaaacagagagtagtttcgtggttaccagaaaccaggacttctgtgtgtgtgggggtggggggtggggcgtggatgaagagaggttgattaatgggtacaataatacagttaggtagaagaaatgagacctagtgtttgataaatcagtagagtgacatagtaaacaatcatctactgtacatttcaaaataactagtagggaacaatttgaatattcccagcataaagaaaagctaaatgtttaaggtgatagatatcccaactatcatgatttgattatgacacattacacaaatgtattaaagtatcacatgtaccttgaaaatatgcaaatttattatgtttcaataaaaatgtaaatttgcaatccccacctcagaacacaaacttcagaaatgggactcacacatgtgtgttttatcaagctctccaagcaattagtaagcactctaaagtttgagaaccactgatctatagaagagatttcaactccttaggaggcgctataaaaccctttaccctctaatcccaatttcccttcctagcctcatctcctcatctcctacaggcagccagtgcaccaaatactctctctccagagcacagcatgttctttccatgaaaatttaactcatttttaataacctacacaaatatctctcatgtggaattttcttccctgtttcttcattcttctattcattcaattatttattcattcagtcagcaaacatgcagtaagctcatagttgctaggttatggggatacaaagataaagaagcttacagtctagtgggagagattaaaacaaaaatgaaaggttaaaatataatgtggtgagtgatacaatagaggcaatagtagagtcctatggaagttgagttgaggcatccctaactctgcctggatgcaggcagagtattgttctggaagtctcagaaaggaggtgacaccaacagagtcctgaaggacagtaagaaatcttgaaaggcataccaaggtttcccagaccttccttaaacagagttggttccctcatctaagctcaccgttcttgccactccttgacccattgctcactggataccatactcaacctgccacataagccatctcctacttgaggacctgggtgtgcccctccaatcacctgaactgctctggcgttcttttctggtagttagttccaatgtcttcctaatgtggctcttctactatggcctagagttcttaatagtcatgtccctgttttgctactgaataaagttcttacaggcccccagaaaggctggacaccatgacactgtccccgttataagaacattgcattcgcaacatagaaggcagagggagagttgcaatatggaggcacaaaaaaagagctttcatcttctgtttaaagttaaatggcccatttgaaattcagtctatgaccttggcctcctcagcactgggccctagctaacagagagctgattaccccagtgcaggtttgctacaaataatattttcaaggtgcttctgtattaggggtaaaactgtcctttggaaaaatagtgtcagatactcactggtagccatgttgtgtacaataaacaagcagcatatgcatttacctctttagaatcacttgaaatctgtcagaaggaaactttttagaaactgcttcataggcagtgtttaagaccaacacgatcaagctgagtggaggcactgaacacctcaggactccagaggatatatttcctgctcacttagtctctggttgtttaacaaaagcaatgtcttataatcctcagtgcaacgatctgcaacttgaaagcatcttagttttccaactgtggggaactaaaggtatttcaagaagtgatttttaaatattcctagacttgaaccaactaaagatagccaatgcaaataaacacaacattgaaagtcaaaacgtaatttaccttctgttgctacacaactaggccaagaatacagcagcttacctcccttctgccttgctgaagtaggcattagtccctggaagctcactcagcaggcaaatggaatggaaaataactgctgtgtggtggcaagaaggcccttgaaggatcccatttgccctctgcccctaagtaaattcctttttaccatgcctgagaatcttccattctaacttcattcttctgagttccataaagcttttcagccttccagagtcctctgtgaattaaacatgagaatcctgggaaggcatcaaagcacaaacccttccagttatcatgtaccaggaagcgggtaaatgaggaccacaaaggatcttctggcactgtattctagtgaggaggtactgagaggagaagcaagatactgcagaagatatgactattgagctaatctgggcatagctgagccagaataagattgcataaaagatttcattgagcctacttgtgtttgccatttccaggagaggactttttttaagttgtcttgaagtccaaatttgaaggctgggtaatgacaactccagagtttttggccccatgcctaacttgtggctccccagatctgttgggatttttcagaccctctgtgtggttcctttgtgcctatctcaaatagctccttttttctaagctcagttgtaaggttgcaactctgagtctacatggattctgccaaattctgccctgattccaagaaggaaatgcacatccggaaagggctaagaagagcagcaagattttgctcacaaaatcaggatctatttcttcatgtctgaaatcccaagcttttctctccttatttagcaaaaatagtaactgggtcaaatatagaaaactcaccacctctcccttttatttacttctccatctgtgtacaggcttcatcaatgatgacagtgggaatcggcttggcttttgagctctggtttgttagctatttgatatgaggaagcagctgggagaatatatacacatgtcattcctgggccacattccaggggggcccgccattgggcttttcctcatttgcagaagcgagagactgttctggaagttggttacagaacccttagaaaagatgccttccctcttttgctttttttaaaaaaaaaaaaaaaaacatacatggaagcattttaataatatgtattgtgtctttcttctaaatacaaaagtaataaatgcccactccagatcacagtgctgcgaaaacacagtaaaacaaagtaaaataaaagtaatccataatgccactaccataaattaaccataatgattatttttgtttatgtctttctgggatttttctctgcatacctatgaaaataaagaaaattattagttattcataatcttcccatgcttttcagtaatttctaagcaaggtggatgccgagaaaaagtcattgagtcatttcttccatttcctgtacacaacaaagcaaagttgaagatgaagaggagacttagcttgttctgcctaagaacagactagagctgtgttgtccaatacaatggccacgaaccacataggggtaacttaggatctctattattaaataaaatgttaaaaatacatttcttcagttacaccagccacatttcaagtgcttaattgccttgtgtggttaatttaaatcagttaaaattaaatacaattaaaaatatattttctcagttagaccagccacacttcaagtgctcaatagccacatgtggctagtggctgccacactgggcagagcagttcatagtaccttttgatcactgcagaaaattctattggatatgctagactagagaagcacagaaggctgtatggtggtgatggtggtgatggtggtggtgatgatgttagaggcggaaaaagaggagatgattctgccagtagaaagggagtcactgaacgtgtttgagacaaagagaagggagaacagcagcttcagaaggacattggtgggaaagagaaacgtttaaagggaaggctgtctgacatatgaaataacttcatccctatgacattttcttataaaatctttgagaaaacctatgtcatttatttatatttagatttggatttgtgggtgtgtgtttttacatgtgatatatgttactgacctcaaagcggacatctagaaaaagcaagtttggcctacattcgggttatgtaagatatacatgggtatataaaacaaatgagacatgagattttagaagaatgtattgtcttgtttcttgctcttattcacttagcaatgtaagaaacatttctcatgttcatcttttatatacacatacaatcaattaaatacatatataattatatatacaacaaacacatattcctttaagaaatatttctagacgtcaaataggttgggatagaagatatacacaattttaatactctcaacatattattttgacattgttctccagagcagatacaacaacataattgcccacagtaatgtatgcacattcccatttcttcacatgctcatcaaaactatatatttttattctttttattttttgaagttttcagaggcaaaaacatagtatttgttttaattagaagtatttttgaggtttctctaatcacgtgcggaaagaacaatgtcaatgctaacactaatatcatctttagtctctcaaagcatcatggggaaacctctccatgaaatctgaaagaggtaccctaaaccaaacaacctcttataattcaattcaaacaaatctcttctgacttaaatctccaaatcacttggtgcctctatgagaacacttagtaatctgcttgtactaaatatatttatatacatctccatttatccccactggatcaggattatatttcattcccttgtgaacaactttgggacttagcacaatgttttatatacaaagacagtgaaggacgtatatattaagttgaagagcttttgctcttctttgaaaccttgagcttctgatggggaaatacagagacatggtgctgacggtaccagaactgtttttaatcctaattcttctcttttgagcttcggtttctctctatataaaatgagagagttaacccagctgatgtttctgatctgttacagatctaaaacaattgtattccaaggccccaagtgtgtgtagggattgagtgggatagggtgagagaggtgtgtgtcttcacatgagtctatgcatgcaagtgtgtgtgtaggaagaggagaggagtgattaattgatgttccctcctctctgctgggagcccttagagataagggaaaagaagagacagcaacaggtttgaacaccaattagataagacttcatgatatacaagcacaccctaataaattgttttgtgatgcctgctctgggccttggggagaaaagttcccatgattcttttagaagctgaaggtcatatcaaagtgccaacgtttgcattgttctttctgtactgaagttgcaaccaaaaaaggaactctgtgtagcttagttcttgattaaaagcagcaagatcatttccaacatgagttagtagccccctgaggctgacattgaatagttctaatattttggagtctctattctaattatcattctgaacaagttttatgccaaggacagaacatttcatcggtggaatatctgggtgctatggcctcacgaataaatgactgcctggctggttgttggagattttgtgtggtaataagggttttcagaagggcatgtctttatcctaataaggagatagttattcttcaaataatacaccacgagcatcccacatcccagtcacagacaaggctgttttaaggcatgaacacaacatcaggtttgtaccttatactgtagcctgaaggaatctatttttctgcctttttcttgggtcaaatagagagttcattgaattggggagactttctgcagattcattgtgaagagtcacacttattcctgcaagatgcagaacttgagaacacaaagaacattgaaaattattgttcagatgggttaactgaggtcctggaggcagaaaagatttttccaaggtctcagagatggtaaaggggcagaccaggactcgaaaccaagtattgactctcagttcagtagcaaatgctgaggagctcccctgcccctatttcatccatgccacccatactgattggttacttactgtgtgcctggcacagtgataggtattagggagacctatgggaacagggcagatctgtctctctggatgctttctggcatgggtgcttcctgaattactaagatactacttggctgagctctgaactcacatttgaggaccatttgcaccaggaccaaaaatatcagtattttcttactatcaagagtccataggcctttgtattggtgactgagtgacttccagttgtccctttatttgttccatccactcagcgaagtacaaaggactaggagacatttacattcttctttgctgagaaatttcaaaaaatacagtgtctttataaactgcattatgggaacactaaaataaaactagcattcattctgtcagggacatcagtgccaaacatggattttaccaaattcacagtgccttcgaggtcacatttttattagttgaaaaatgcttagtatgtttcaggaggaaggagaaaaaccaaattattccatcaagtcagaagctctaagtgactgagcaaagaccagaactttaggcctgcttgactccacagagtccacacgagaaatgtcagcaggaacttgggcaatggctgtgggaagaagaagaacaaacatctccaagataggatcatcaggactaatgggtctgtgttaactcagtagtcatgcatccctcagatatttattgagcccttgctatgggccaagcctgtgcattccagtaatatttacttctgtagcaccccttaaattgtgatttgtctgtagttctacagatatgcctcatctcttaaactagaaagtaagctctttgaagtcagatgctatggtttatatgtctttgtacccacctcccacaatgactgtggagaaaaagttctaaaatactggagagggaggggttaagtgatgtacagaagagccacgttttttccagctgtcctgaagaattattgagtacagaacatggcaatgctgtccagaacatcccaactggaaaacttcctactgactattcctatgtttatctcacactcagcattctgtttgttcccactcaccccaacagtcacctcatcgttgccttgatctgctcccttgtatattacttatattaaaataagttagttccctgaggattgttagctccttggggactatgtgtcattaatctgtgttcactcttccccatagaacctagtgcacttgcacatactatgtgaacaataaatattttttaaataaaacataataacagtgacaggttaatagcagatatgccacaggccatggatcttcattgtgctggtttgccttttttccaaatggaccatatcctaaatggagttcttcatttaccaaatccaatctcactgcaatctcctttatatttgtccttggcatcaatagcacaaagaatcttccagtctccccagctgggtactttgggggtgtctttgatgaaaataagatgtgaatagcaatacatcaaaactgaactatttaacagacatttggaaactgatgcagaggtggaagagtcctgctcttcctctgagactggagagaagaatgagataacatgtatagagatgagttgaggtagagataagaggatatataaaggactcaatctcagcaaagtaggagaggtaatctgctaaggctggcggtgggtggaggcttgaggaaggaaggggaactctggaataactggtgtcaggaactcccttgcgtattgacaagattgaaattctgcatcaaggatcctgaatcaacatgacatcctcaaataaaggtcccagtgtttgtagttcttgaaaaatgactgtaggaactgactaaattaagtattcttcttagacaattcatgggtataagatggatgttccttgtgtagagtggcccatttaaacaggtcccatttaaagttaagttaggacacagctattctagatacagtataagatgattttcttttgcaattcctccatttgagttttaggatgggatagaaagtcaatttctaaacattaaccttttttatcattaattttacttgctgaaatatgctaactcatattattgttctgacctcttccaacctttggctttatgtaggtcatttttaccctcttatttttaagacaaagacacggccacacaaaaaaaggtagagcttagtaaattattatatgaataatacccttataaacactaccagcttaaaaaatgaccggtcaccccacaagtttctccaaatgcccagtcatgaatacagcctcttctctccctcaagatgtaaatagtatcctgaactttatactaatcatttcactgcactctttatggttccatcacccaaaggtgaattgctagacactataatataatcttaaccatttaaaaaaacctgatatgtcctgtaaacttatgttaatctataggttcttcctctgtccatttcttttccctaacatttatatgctacagaacccaggctattttacccatagaggctcccacagtctgcatgttgctgattacatactcatggtgcacttcaatatgctcctctgtatttactggtggatcctggtcttgttcagtctcaggttttcactttttttgttgtctgcagacattgatgttcagttgcaaaatgaacacattctataattttattttcatttattggttggaatgatatttttattgagatataatttatataccataaaagtaaccattttaaaatatacaattccatgatttttagtatatttacaaagttgtgccatcatcactctgtttattgttgttattgctctttgtttaatcacttttctgaactaattttgtaaaatctgcattctttgctgtgtgtggtcaagtggtcacgaaagtctgctgcgttagtttggtgatcagttaatgattagacagagatttccttaaatgcctggaaataataagccttccggtcttttcctagaggctctgtgtgtgtgtgctgggacatgctttcaattcccagtcaggcggttttcaactatgccttagcctccccttcctccttgtgcaatgttagctagcatggacagtgcgaggctttcttactgagcatgtgcacagttttacaaatgtgtgcatccttctagattctcaggaatatgttgtagcttttcaaagttcctactgacatctcattcccccgcttttccttttaagctttttggttagccaattgtttaccccatttgtcatccactacttcaggaagattcaaacttaaacaattgtcttccaatattttcaacacacttctccagggaaggggcattttgcactaggtgatctctattccaggtctaataaagacactcttgcaagtgaagtcttccaggaaaccaccagacacttcaaataaccacaattctctaggaaaggaactttgatggagcaccaactctgttctgccccatctagtggctgtcaagatgctagtttccactgtgattggaggctgtttgctttcaaggctaccacgaaaatgaagacgggggatagacataagaatgggaaaatgccacaaagctcactgttcttactgagattaagccattttcttgaacaaagcttccttttttctagttgcttgttaatttccagagttctaaaagcatcaattctgacatttcttttgctaattttcttctatcaagaaggaagagagacttttcagaggtctttaccatttttgctgatatctgatgatggaaatgattttattaaaaaaaaaagctttctctcatcctatataggaaagataataaatgctggattccttttttttttgcccatttcctatcatccttaaaagaccatcaattattattttttaaaacaattatgaacttattaaataatcctatttgatggttttcaactcattgaaattcttgtaattattgtagcacaatctgtaactttggccagagagaatttatttaagtgggctcccaagtctttttggcatgacactggcattacttaatagtttcctatcaaggatattaggatgtttgggttttatcttgttcatttcctgcctcagacctgcaatcaactatttttttcccaagagctctggattcttttgggcaccagggatgctcactgctaatagattcatcattgtttctaaacctttttagtgtaccaagcaagggaatatatatttaaagacaaaatatctcatgttttcatactgatatctctaatttaaattcaggatgacatggtttttaatctcttttatattccatttgtatttcctttcttccacattaagaatcaattttctcactgacacagagatgatagacttgaaacactgtttctcaatattttattcattaatgaccccccaaatagcctttgatatatgtttttcctaatagccctccaccattaaattttaataccatagacatactgtatatttgttaccatactatatgtatatctgcactttgtatatatctgcactttatgcacttccttgtttatatataacaacttgatgacttttttcactccccaagaatcattctttgacctcttgagagtaatattagtcccattgagaatacatgacttaggacattctgtatttactcatttgcttttttccatgtacacacacaataatatctgtataacaatactattatggtctctgccaatatggttattgaaaataatttaagcattttgcatgtgctaacccctttcttctccaattttttttctattgtactatatctaaaatgcctcatcatatagccatactatactctctcctaactctcatttagacttaattctaggagtaattatatatttaatgcatgtcaccaatacttatgttaatatctatctagagatgtctaataaattttacttgtttaacattcactttccattattttcctcagaaagcacttacgcaaacaagtattttagctccaatacattgccgacaatttgttcatcgtatacaggaagacctgttttcgtggacataaaattcctggttcacatgttattttccttacataccttaaaaatattattcaattatcttgtggcataaatcattgctgttgaaaagtctaatgacagtctgattttatttttccttataagccttgctttatttaggatgcttgaagtttttatcaatttctttaacacccagtaactttagtagaacatattccttgtttgtcattctcagtcagtattctcaggtatgcaatgagtgtgctttttcaatgtgtagtttaattttatatatatatatatatatatataataagtatgtgtgtgtacatgtattttttgtgagtatctgttctgttcacttgcttcagtttcctttcacggatttctattatctgtatgttggatcatttttcttaccttccattcttataattttctttcaagttatttcatattttcacttatgtttatttttttaaagttttaccttttaattttgtgtttctggtaagacattatttattgtacttattctcttttgtatttcttctagtttagtcttcatttctatttttttttttttaattcttgagtttggctacccaatttttgagtttttctaattattatttgttcagatactccttgacttacaatagggttatgtccgaataaacccatcataaagttgaaaaactgtaagtcaaaccattataagttgggggctgtctgtattgtttttccgtatcttgtatcaccttcttagtatgtttaatttgtttcaaaataatataaatttgatctgttttttaagcacgcctttctgatacattttcatggtatttagggatattactttgctccttattctcttttcttgtagttacttcttatgagattttaccttaacacgtttttgttgctcattttaatgtgaattggctttgactcatcttttagaaagaggcatgattcagatggattttctaacttcaaaagacaccctgtcgttatttttgtgtaatgttaaacaatatggccacttgttttctgagatttcttttatctttttccctccctgtctttgatttagaccttccttttccctcctctccactgtttctaacatgttctaattgtactcaactgccaggagttcctcctcaatacggggctccatcctggaaagggagtcctagtgggtcaatcttataggtcatagagaatacacagctccaagcccctttagacctccttaagctaggctcctatattttattttatttttaattatttaatttaatttttgtatatatccttccatgtatcccaatgcttttcatatttatcattttcatcggttgcaaacattttcattaagtttaaaatgccataattttataaccattctctgttaatggctgtttgggatatgtccagttttccataataatacataatacataatgctttctttcttctgaattatacctttaaaacatatccaagagtgagattatttattaaaaaggtatgaacattttatggctcttgctaaaaagtaccaaattgatcatcaaattgaccaaaatcatttacaatgccactaaaaatctataaatgtgttaatttccccaatagcctcatcgctggttttaataatgttcctttattgttgctaattttggaggtataaagtgacatgtcattgctgttctaatttgcacttctttgctagttgccaagaatgcagtttcctatgttaatatattaatggtgtttcatcttatgtaatcattcttcccatcttttgaccactgtccacagggaacttaatgtaaattataaaaactcttagtatattttagaaatgcatctgccattatatatattaaatatagttttctcttttgtcacttaacttttatcgtggttttgttgcattttagtagtactaatttttgtgcaatcacactgcctatcttttcctttgtaatttattttcctactttaatcaaatattatctccctctctagactgaataagtgctctattttctcctgttttttttagcaatgtaatcacatttttgtgaatatttcacactttaatttttgtgttcttgattgggatatgtcacatgaggtataggtttaagttaatttttctccatagtaatctcaaattatcccactatcatttaagtaaatgaactcattccttgttgctttgctaaatgtagctggacatatattgaacttgtaagttggattcctgggtattttattctctttgaagcaattgtgaatgggagttcactcatgatttggctctctgtttgtctgctattggtgtataagaatgcttgtgatttctgcacattgattttgtatcctgagacactgctgaagttgcctatcagattaaggagattttgggctgagacgatggggttttctagatatacaatcatgtcatctgcaaacagggacaatttgacttcctcttttcctaattgaataccctttatttccttctcctgcctgattgccctggccagaacttccaacactatgttgaataggagtggtgagagaggccatccctgtcttgtgccagttttcaaagggaatgcttccagtttttgcccattcagtatgatattggctgtgggtatgtcgtagatagctcttatgattttgagatacatcccatcaatacctaatttattgagagtttttagcatgaaggttgttgaattttgtcaaaggccttttctgcatctattgagataatcatgtggtttttgtcattggttctgtttatatgctggattacgtttattgatttgtgtatgttgaaccagccttgcatcccagggatgaagcccacttgatcatcgtggataagctttttgatgtgctgctggatttggtttgccagtattttattgaggatttttgcatcaatgttcatcagggatattggtctaaaattctctttttttgttgtgtctctgccaggctttggtatcaggatgatgctggcctcataaaatgagttagggaggattccctctttttctactgattggaatagtttcagaaggaatggtaccagctcctccttgtacctctggtagaattcggctgtgaatccatctggtcctggactttctttggttggtaagctattaattattgcctcaatttcagagcctgttattggtctattcagagattcatcttcctggtttagccttgggagggtgtatgtgtccaggaatttatccatttcttccagattttctactttatttgcgtggaggtgtttatagtattctctgatggtagtttctatttctgtgggatcagtggtgatatccctttatcattttttattgtgtctatttgattcttctctcttttcttctttattagtcttgctaggggtctatcaattttgttgatcttttcaaaaaaccagctcctgggttcattgcttttttgaagggttttttgtgtctctatttccttcagttctgctgtgatcttagttatttcttgccttctgctagcttttgaatgtgtttgctcttgcttctctagttcttttaattgtgatgttagggtatccattttagatctgtcctgctttctcttgtgggcatttagtgctataaatttccctctacacactgctttgaatgcgtcccagagattctggtatgttgtgtctttgctctcattggtttcaaagaacatctttatttctgccttcatttcattatgtacccagtagtcattcaggagcaggttgttcagtttccatgtacttgagtggtttcgagtgactttcttaatcctgagttctagtttgattgcactgtggtctgagagacagtttgttataatttctgttcttttacatttgctgaaaagtgctttacttccaactatgtggtcaattttggaataggtgtggtgtggtgctgagactagagggtggagccaagatggctgaataggaacagctccagtctacagctcccagtgtgagcgacacagaagatgggtgatttctgcatttccaactgaggtaccgggttcatctcactgggcagtgtcggacagtgggtgcaggacagtgggtgcagcgcaccaagcatgagccgaagcagggcaagtcatcgcctcacctgggaagcacaaggggtcagggaattccctttcctagtcaaagaaaggggtgacagacggcacctggaaaataaggtcactcccaccctaatattgcacttttccaatggtcttagcaaatggcacaccaggagattatatcccgcgcatggctcggagggtcctatgcccatggagccttgctcattgctagcacagcagtctgagatcaaactgcaaggcagcagtgaggctgggggaggggcactcaccattgccgaggcttgagtaggtaaacaaagtggccaggaagctcgaactgggtagagcccacctcagctcaaggaggcctgcctgcctctgtagactccacctccaggggcagggcatagccaaacaaaaggcagcagaaacctctgcagacttaaatgtacctgtctgatagctttgaagagagtagtggttctcccagcacgcagctggagatctgagaacagtcagactgcctcctcaagttggtccctgacccccgaatagcctaactgggaggtcccccagtaggggcagactgacacctcacatggccggttactcctctgagacaaaacttccagaggaatgatcaggcagcaacatttgctgttcaccaatatccgctcttctgcagcctctgctgctgatacccaggcaaacagggtctgcagtggacctccagcaaactccaacagacctgtagctgagggtcctgactgttagaaggaaaactaacaaacagataggatatccacaccaaaaccccatctgtacgtcaccatcatcaaagaccaaaggtagataaaaccacaaagatggggaaaaaacagagcagaaaaactggaaactctaaaaatcagagcgcctctcctcctccaaaggaatgcagcaatggaacaaagctggatggagaatcactttgacgagttgagagaagaaggcttcagatgatcaaactactctgagctaaaggaggaagttcgaacccacggcaaagaagttaaaaaccttgaaaaaaaattagacgaatggctaactagaataaccaatgcagagaagtctttaaaaaacctgatggagctgaaaaccacggcacaagaactacgtgacgaatgcacaagcctcagtacccgattcaatcaactggaagaaagggtatcagtgatggaagatcaaatgaatggaatgaagtgagaagagaagtttagaaaaaaaagaataaaaagaaacgaacaaagcctccaagaaatataggactatgtgaaaagaccaaatctacatctgattggtgtacctgaaagtgatggggagaatggaaccaagttgcaaaacaccctgcaggatattatgcaggagaacgtccccaatctagcaaggcaggccaacattcaaattcaggaaatacagacaatgccacaaagatagtcctcgagaagagcaactccaagacacataattgtcagattcaccaaagttgaaatgaaggaaaaaatgttaagtgcagacagagagaaagatcgggttacccacagagggaaggccaacagactaacagctgatctcttggcagaaactctacaagccagaagagagtggaggccaatattcaacattcttaaagaaaagaattttcaacccagaatttcatatccagccaaactaagcttcataagtgaaggataaataaaatcctttacagacaagcaaatgctgagagattttgtcaccaccaggcctgccctaaaagagttcctgaaggaagcactaaacatggaaaggaacatctggtaccagccactgcaaaaacatgccaaattgtaaagaccattgaggctaggaagaaactgcatcaactaatgagcaaaataaccagccaatatcataatgacaggatcaaattcacacataacaatattaaccttaaatgtaaatgggctaaattttccaattaaaagacacagactggcaaattggataaagagtcaagacccatcagtgtgctgtattcaggaaacccatctcatgtgtagagacacacataggctcaaaataaagggatggaggaagatctaccaagcaaatggaaaacaaaaaaaggcaggggttgcaatcctagtctctgataaaacaggctttaaaccaacaaatatcaaaacagacaaagaagaccattacataatggtaaagggatcaattcaacaagaagagctaactatcctaaatatatatgcacccaatacaggagcacccagattcataaagcaagtcatgagtgacctacaaagagacttagactcccacacattaataatgggagactttcacaccccactgtcaacattagacagatcaatgagacagaaagttaacaagtatatccaggaattgaactcacctctgcaccacgcggacctaatagacatctacagaagtctccaccccaaatcaacagaatatatattcttttcagcaccacaccacaccacacctattccaaaactgaccacatagttggaagtaaagctctcctcaacaaatgtaaaagaaaagaaattataacaaactgtctctcagaccacagtgcaatcaaactagaactcaggattaagaaactcacacaaaaccactcaactacatggaaactgaacaacctgctcctgaatgactactgggtacataacgaaatgaaggcagaaataaagatgttctttgaaaccaacaagaacaaagacacaacataccagaatctctgggacacattcaaagcagtgtataaagggaatttatagcactaaatgcccacaagagaaagcaggatggatctaaaatggataccctaacatcacaattaaaagaactagagaagcaagagcaaacacattcaaaagctagcagaaggcaagaaataactaagatcacagcagaactgaaggagatagagacacaaaaaacccttcaaaaaagcaatgaatccaggagctggttttttgaaaagatcaacaaaattgatagaccagtagcaagactaataaagaagaaaagagagaagaatcaaaaagatgtaataaaaaatgataaaggggatatcaccactgatcccacagaaatacaaactacaatcagagaatactataaacaactctacacaaataaactagaaaatctggaagaaatggataaattcctggacacatacaccctcccaagactgaaccaggaagaagttgaatctctgaatagaccaataacaggctctgaaattgaggcaataattaatagcttaccaaccaaaaaaagtccaggaccagatggattcacagccgaattctaccagaggtacaaggaggaactggtaccattccttctgaaactattccaatcaatagaaaaagagggaatcctccctaactcattttatgaggccagcatcattctgataccaaagcctggcagagacacaacaaaaaaagagaattttagaccaatatccctgatgaacattgatgcaaaaatcctcaataaaatactggcaaaccgaatccagcagcacatcaaaaagctcatccaccatgatcaagtgggcttcatccctgggatgcaaggctggttcaacatacacaaatcaataaacgtaatccagcatataaacagaaccaatgacaaaaaccacatgattatctcaatagatgcagaaaaggcctttgacaaaattcagcaaccttcatgccaaaaactctcaataaattaggtattgatgggatgtatctcaaaatcataagagctatctatgacatacccacagccaatatcatactgaatgggcaaaaactggaagcattccctttgaaaactggcacaagacagggatggcctctctcaccactcctattcaacatagtgttggaagttctggccagggcaatcaggcaggagaaggaaataaagggtattcaattaggaaaagaggaagtcaaattgtccctgtttgcagatgacatgattgtatatctagaaaaccccattgtctcagcccaaaatctccttaagctgataggcaacttcagcaaagtctcaggatacaaaatcaatgtgcaaaaatcacaagcattcttatacaccaatagcagacaaacagacagccaaatcatgaatgaattcccattcacaattggttcaaagagaataaaacacctaggaatccaacttacaagggatgtgaacgacctcttcagtgagaactacaaaccactgctcaatgaaataaaagaggatacaaagaaatggaagaacattccatgctcatgggtaggaagaatcaatatcgtgaaaatggcaatactgcccaaggtaatttatacattcaatgccatccccatcaagctaccaatgactttcttcacagaattgggaaaaactactttaaagttcatatggaaccaaaaaagagcctgcattgccaagtcaatcctaagccaaaaaaacaaagctggaggcatcacgctacctgacttcaaactatactacaaggctacagtaaccaatacagcatggtactggtaccaaaacagagatatagatcaatggaacagaacagagccctcagaagtaatgccacacatctacaactatctgatctttgataaacttgacaaaaacaagaaatggggaaaggattccctatttaataagtggtgctgggaaaattggctagccatatgtagaaagctgaaactggatcccttccttacaccttatacaaaaattaattcaagatggattaagtacttaaatgttagacctaaaaccagaaaaaccctagaagaaaacctaggcaataccattcaggacataggcatgggcaaggacttcatgtctgaaacaccaaaagcaatggcaacaaaagccaaaattgacaaatgggatctaattaaactaaagagcttctgcacagcaaaagaaactatcatcagagtgaacaggcaacctacagaatgggagaaaatttttgcaacctactcatctgacaaagggctaatatccagaatctacaatgaactccaacaaatttataagaaaaaaacaaacaaccccatcaaaaagtgggccaaggatatgaacagacacttcttaaaagaagacacttatgcagccaaaagacacattaaaaaatgctcatcatcactggtcatcagagaaatgcaaatcaaaaccacaatgagataccatcgcacaccagttagaatggtgatcattaaaaagtcaggaaatgacaggtgctggagaggatatggagaaataggaacacttttacactgttggtgggactgtcaactagttcaaccattgtggaagtcagtgtggcgattcctcagggatctagaactagaaataccatttgacctagcaatcccattactggatatatacccaaagcattaaaaaacatgctgctataaagacacatgcacacatatgtttattgcggcactattcacaatagtaaagacttggaatcaagtcaaatgtccaacaattatagactggattaagaaaatgtggcacatatacaccatggaatactatgcagccataagaaatgatgagttcatgtcctttgtagggacatggatgaagctggaaaccatcattctcagcaaactattgcaaggacaagaagccaaacactgcatgttctcactcataggtgggaattgaacaatgagaacacttggacacaggaaggggaacatcacacaccagggcctgttgtggggtggcgggagggggaagggatagcattaggagatatacctagtgttaaatgacgagttaatgggtgcagcacaccaacatggcacatgtatacatatgtaacaaacctgcacgttgtgcacatgtaccctaaaacttaaagtgtaataaaaataaataaataaataaataaaaaatagctttattgagatataatttacatacaattcatgcatttaaagtataccattcaatgggttttaatatattcacagagttgtgcaatcatcaccacattcaatttcagaacattttcatcactccaaaaaaaaatcctgcacctcttagctgttaccccaagcacatcagtcatggccctttccctgcatccctgctaataatctacttttaatctctatagattttcctattctggatatttcatataagtggtatcacaaaatatgtggtcttttgtgactagcatctttcatttagcataatgtttccaaagttaacttaccaaaatatgagagtttgaatttctctacatcctcaccaatattgttataatctgtattttttattatgaccgtcttagggggtgtgaagtgatatatcctccaactgtgtaactgttccttgtttatttttttccaagattgttctggctattctggatcccttgaatttccatatgttgaacccttatagcaaaacacattataatcaaattgtaaaaattcaaagacaaagaaaaaattttgaaagcagcaagagaaaagcaactccttatgtacaagtgatcctgcatcatattatgagtgaatttttcagcagaaatattacaggccagaagggaagggggtaatatattcaaagtgcttaaagaaagcaattgtcaaccaagaatattgtacttggcaaaactatctttcagaaattaaggacaaattaagatttctccagactaaaaaaaaaacttagctggagtggtttgtcaccactaggcctgccttagaagaaatactaaagagagttcttcaggttaaaataaaagaggttaaacagtaacacaaaaagcatatgaaagcataaaactcactgttaaaattaaatatataagcaaatagagaatggctgattggaagcagctagtgcatgactctcatggagaggaatgaaaggagcaagtaaatacagcacgttgaaatgaaacatccaggcacttgcattgggactaatcaaggcaacaactcgacgcacggaggatggagaaaacaaggcaagacaatggcccacccagaagtgatatggaaccagaagaacctctgccaaggaagtggtgagtgaatgtgctaccccaggaaatgatgcttctcccacagatctttgcaactctcaggtcaggagatccccttgtgaacccacttcaccagagccttcagtctgacacacagaaatacctggagtctcagcagagcagtcacttgggcacgagcagagacttgggaacagctctgggcaaagtgggagaatcaatccctgtacatacccctagcaaagaggctgaatccagggggccaagcagtgatggtctgcgggccctacttctatggcacctcacaaaataagacccactggcttggaattccaaccagccactagcagcagtgttgtgcctacctgggacagagctcccgggggaggggtgggctgccatctttgctgtttgggcgacttagcaattccagcctgcaggctttggagagtccaaaccaactgggtgcagaagggatcccgcagcagagcacagctgctctatccaaatgtggccagacaacttcattaagtgggtccccaatcccactcctcatcactaggcgggaccccgcaactgaagcctccagccaccctcactggtgttctctggctaaaagagatttgaaaactccctgggacagagctcccagagggaagggcaggctgtcgactttgctgtttgggcaacttatccattccagcctccaggctttggagagcccaagctgactggggatggaagtggcacagatgctctatgaaagtgtggtcagacttcttctttaagcaggtccctgatcctgtttctcatgacttggtaagacatcccaatcgggtctccagccacctcctacaggtgcgtttgggccagcaacagatccatacctcctgggccagaagaaggaacagattgttctgttcccagaagaaggaacagattgctgtctttgctgtttcacagcctttactggggatactttaggatactagaagatccaaggcaactagggattgaagtggaccccaagcaaaccacagcagccctacagaaaagtggccagactgctaaaagaaaaaaaaaaaaaaaactaaaggtcagcaacttcaaagattgaaggtagaagcccacaaagatgagaaagaatcagaaaaagaacactgaaaactcaaaaagccagagtgtcctctttcctccaaatgagtgcatcaacttttcagcaagagttcagaactaggttgaggctgagatggctgacatgacagaagtagaattcaggatatggataggaacgaacttcattcagcaaaaggattacattgtaatgcaatgcaaggaagctaaaaatcatgataaaacattgcaagagctgacagacaaaatagccagtatagaaaggaatgcagtcaacctgatagagctgaaaagcacactgcaagaacttcagaatgcaatcacatgtattaatagcagaatagataaagcagaggaaggaatttgagagcgtaaagactgactttctgaaataagacagacaagaatacagaaaaaagaatgaaaaggaatgaacaaaagctctaagaaatatgagattgtgtgaacgaactgaatatatgactgactggtgtactggaaagagataaggaaaatagaaccaagttggaaaacatgtttcaggatgtcattcatgagaacttccccaacgtagctagagaggctaacattcaaattcaggaaatgcagagaaccccagtaagatactccatgagaagatcgtccccaagacatttaatcatcagattctcccagtctattctcagagtatttgctttaataggacactcccttacccaaaactctacaatggtaccacactttaatcagggtaaaagtaaaagttcttataatggcccacaaggttatctatgatctggctttttgttgcctctcttacctcatattttacttttcttcccctcaatcattccatgccagcctctttagcctcctcactctttctcaaacgtgcagcaacactcccacccatggcttgccattgctgtatacttggaatatccctacatatgttaagtgtgcctagaactactgggcactcaaaagtgttgaattgaatttacaaagtgcataaattaaacaacagattttctgaatgtaggaggtataagagcacctaatggagtcaaacaatctcttcattgtacattgcattttgtcttcattctttctcttgactcttctttcatgtgttcagcaggcagaggaggtaagacgctagccaatcctaagccaaaagaacaaagctggaggcatcacgctacctgacgtcaaactatactacaaggctacagtaaccaaaacagcatggtactggtaccaaaacagagatatagaccaatggaacagaacagagccctcagaaataatgccacatatctacaactatctgatctttgacaaacctgacaaaaacaagaaatggggaaaggattccctatttaataaatggtgctgggaaaactggctagccatatgtagaaagctgaaactggatcccttccttacaccttatacaaaaattaattcaagatggattaaagacttaaacgttagacctaaaaccataaaaaccctagaagaaaacctaggcattaccattcaggacataggcatgggcaaggacttcatgtcaaaaacaccaaaagcaatggcaacaaaagccaaaattgacaaatgggatctaattaaactaaagagcttctgcacagcaaaagaaactaccatcagagtgaacaggcaacctacaaaatgggagaaaatttttgcaacctactcatctgacaaagggctaatatccagaatctacaatgaactcaaacaaatttacaagaagaaaacaaacaaccccatcaaaaagtgggcgaaggatatgaacagacacttctcaaaagaagacatttatgcatccaacagacacatgaaaaaatgctcatcatcaccggccatcagagaaatgcaaatcaaaaccacaatgagataccagctcacaccagttagaatggcaatcattaaaaagtcaggaaacaacaggtgctggagaggatgtggagaaataggaacacttttacactgttggtgggattgtaaactagttcaaccattgtggaagtcagtgtggtgattcctcagggatctagaactggaaataccatttgacccagccatcccattactgggtatatacccaaaggactataaatcatgctgctataaagacacatgcacacgtatgtttattgtggcactattcacaatagcaaagacttggaaacaacccaaatgtccaacaatgatagactggattaagaaaatgtggcacatatacaccatggaatactatgcagtcataaaaaatgatgagttcatgtcctttgtagggacatggatgaaattggaaatcatcattctcagcaaactatcacaaggacaaaaaaaccaaacaccgcatgttctcactcatagatgggaactgaacaatgagaacacatggacacaggaaggggaacatcacactctggggactgttgtggggtggggggaggggggagggttagcattaggagatatacctaatgctaaatgacgagttaatgggtgcagcacaccagcatggcacatgtatacatatataactaacctgcacattgtgcacatgtaccctaaaacttaaagtataataataattaaaaaaagaaaaaaaaagaataaagaatatctctacatactgccaaaaaaaaaaaaaaaaaagattcagatcactcccctcccgcccccgccctatatgttgcctgcctcggcctctggggcatggagcacgcggcccagccctggcgatggcgacggcgacggcgacggcggtggtggaggagcgcctgctggctgcgttcgcctaccttcagtgcgccgtgggctgcgcggtcttcgctcggaatcgtcagacgaactcagtgtacagccgccacgcgccacccagccgcaggctccgagtgccggcgcgggccacccgggtggtgcagaagctgccctcactggccctgccgctctaccagtacaccagtgagtccaccccgcgcctccgcagcgcgcccagctgcatcctcctggccatgttcctcgtccactactggcatcggtgcttaatttacccatttctgatgcgaggaggaaagcctgtgccactgttggcgtgcacaatggcgattatgttctgtacctgtaatggctatttgcaaagcagatacttgagccattgtgcagtgtatgctgatgactgagtaaaagatccccgttttctaataaattttggcttgtggttaacgggcatgttgataaacatccattcagatcatatcctaaggaatctcagaaaagcaggagatactggatacaaaataccaaggggaggcttatttgaatacataactgcaggcaactattttggagaaatcatggagtggcgtggctatgccctggccagctggtctgtccaaggcgcgacttttgctttcttcacattttgttttttatctggtagagcaaaagagcatcatgagcggtacctccggaaatttgaagagtatccaaagttcagaaaaattataattccatttttgttttaagtgcattttcaacgaattaccttcaacttgaagctttccaatggtatttttcaatggactttgtaaataagttatatctttgtaattttcctgctacttcatcattttcaagatgtcctctaggaattttttttctagtaattttgcaagctacctaataagtacctaaataaactgaaacggaggttgaggtatcctactgtgtaacaggtcagaatttcaaactccgggtaataactgctgacattttttctaatttcaaatttacctcttttggctatgtcttgccaagggtgtacaagactagaatttgcaactgtctgatggcattttcagtcaaactccaggtaataactgctgacattttttctaatttcgaatttacctcttttggctatgtcttgccaagtgtgtataagactagactttacgactatctttgatggcattttcagaacaataaatgtcacaatcccttctatagccccctacggtgatcccttcaaggtcaacggcagtgttgcttccctttccctgtagggctgggatctgtcttggagtcctctctcggaggccacagaggccgggggtagccattgtgaagtcatggcctgggggaaagttgccaaacttcgtgtcaggtgctgtgtgtaagtggagaacttggggatagaggaggaagctccttgtggcccttctaaggcggggcaaaggcatctggacttgttccagcccagcccaccgggtgacatcaccgggcagggaggggtgctggtggtggttcatagggagtaagctgctctgcctgtgtgagtggctcctgggccctaaacaagcacctttaggccatgggtcactcaccatgagccatcaatatgctctggtctgacatggtttctctctgtcttctagtctagacctagtcttttgttctgttccccaggtatggatatactagagattgttgtctgtgaaatttctcctttgtagagtttgagttttcccttgtagtgtaaagaatgatcaccttctgtaacgatagcaagaccactttttaagatttatcctctttgttctttgttgattgaaacataataattacattgttaaaattctctacagccttctttttcttccatagctaatcttccaatagtttttgctttctgtttcgctgttgttgctttgcaaagctttcccctcatagcctgtatctgttatcaatataaaataatcttcctgttgaatgcttcatgacttgaattctactttgataaaaacattgccatactgctttaaaaaaaagattcagatcacagcttctttcttcattgggagaacgggcactcagtctgctctgcatggaaaccaacgtctttgctcattcacatgtgcattcttgggcatctttgaaatatgagtatcatcttcctttccagtttgcagagtaacaaatgtgtttagagagcacattcagtgagttttctgtctgaacattctttctgaacataatcagctatttagaacatgactcactcatcaaaaacattggtgtagtttggagaaacaatgttcagattgcagtttccctcatcctgctgggtaaaaccattgcctttggtctggcacatgtgtacttgcattacatttaatttaataaatactcatagctgaatgctgatttaaaacctgggaagacacacttgggtgtttacagttaaaaacattgcatacaactaattaaactcattcttaacctttttttctcaattgacttttcctcattgaacatttatgtgcttacagggtcattctattataatcctctgtaatcttctgatgccagatctgacattcaaatacgactgtcctttctgttggttaccttttaacattgcaatgaaattcagtggatatttagttttagaccccaagctgcattaatctaatggatctccacattttagaatatccttcatgtatatatcataagtgagagaaataagtgataaagaatgaagagggcagatttgtcagagtatcaatgccttggggttataaaaatgaatttttaaggacactgctcatattcatcatgtctaagagaaagtgacttcgtgtcaaatagctattggtagtactttggaatcaaagatgtcagtggggatgtaacaacttatataaaaaatttcttctgtaaacactcgtattggtgcaatcatcactttttttttaacctttcaattttttatcttatttgactagcctgtaaaaagtgttcagataggggcaacctcatttatcctgaagaaaaagcatttactattaaagagtttattaggcaacgagccctgggacttttaaaatggaagaactgatgacacgttcttattttctgggtaatttgttttctctttgctgtgttctaacctctatctcagaagtgttttcttagtaagctaaaaagatcgtaggtctctatgtggttgtggcacttcattatagttgtaaacacttttaaagactccaaactctttcacatacacaagaaatatttctctctgaaaactcaaggaaaatgccatgatcatgttaaataggaatcaggttagagaattatgatctatttttctcagcaaagagttgcaagcatatatgtgttagtcttggaagattccatgattacttcctttcctatgctccttcgttccactcccaaatccagtaagtcatctatccaaaatctttcctaatgatagcttttacacaaatcaactcctttttgttcctaataccttattcttatgggttgaattgtgtcctaccccgcaaaaagatatgtttaagtcctaacccccagtacttttgaatgtgaccttatttgaaaatagggtcttttcagatttaatgaagttaagataacgttcttgtaagaaaagagacacagacatacatagaggaaagacagtcatgtgaagacagaggcagagattggagttatgctgccacataactccaggggacaggggcggaagatgggagaacagtggggaatctagtgcaataaaatataaataaaagatgatggtggcttagactaggatggtagtgatgggtgataaaaagtcagattctagaaggaaagaaaaaggaggagagggaaggagggaaggaggaaagacgggtagatattatggtagagtcaaactaattttctggtggattgcatgtgaggtataagaagataagtagcagagaagaatcaagaagcgctccaaggttttgggcctgagctaataaaaaggaaggatggagttggtattaaataatatatggaagactgttagtggagcaggtctgagggatgggtgaagctcaggagttctgttttcatcatgttagttttgagacgattatgagatatccaggtagatatgtcaagtaagaagttggatatacaaatattgagtttagtggagaaatttaggcaagagctatacatttggcagttagaagcacatataaggtatttgaaacaaacaagataatgaccttcagaagaacagtttagtagaatggtgagggtgaatgcctgtttggagtgggttcaaaaaagaatgggaaaagatgaattggagacagttagtgtagacaactccatgaattcttatgtaaagggaagacaggaaatgggattataagtggggtcaacaaaaaattactttaagctgagaggactaatagcatgtgtttatgctgaagaaaaatttatccaggagaaaggcaaaaacacctgagggagaaaggaaaattgctgaagtgatgtctttgagtaggcaagaggaggatctaatgtagagttggaagggttggccttggataggcagaagcaataagagttcatcttttgcgataggatagacagcaaagaatatgggttcacacaaatgcatgtgggtagatgttttagtaggagtctgcagaagttttcttctaaccatttcagttttctcaatgaagtaaaaaatatgaacactaactgacagagaagttgagagaggaggtgttgggtgcttgaggagagagaagaatgtgtgaaatagtcatctgggagagtgagtgtacaaactagactagaaaaaagtggtgggatttgctagatggtactaagggcccacttgcagttcaggaaaccagtcaacaaggctgtgggttgtctccagttattttcagttgcacagttgaatacacagagaagttggatttagccaggattgtagttttgccatataagagatggaggcaattgattagagggtatgttttacaaaggatccatataatgattggccatgcaatttaaactgggaaaggaagaagaagaggatatgagacaggcgaaggacagcgaaccatggtagagcataccatggctagactcttaattccatctccagtgctgagaagaactaaaaaaaaaaaaaaagaagaggggtccagtaaatcatgggaattgtattaatgccctttagcttgtagagaatgtgccagtacataggtccccatgggacctcagcaatatgatgatccatcagaattcaccaccttttccaaaggaatgtgttgagttgaggagatgagttaatactcacacaagtgaaatgcaaccctggcttggtagaggggtcctgatatgtttaacaggactttaggagagaaaatcttcaacatagatttttctgcaaatacccatgtagcaccaactgaatctccaccaataataccaattcacctaatagaacttcagcactgagactacagaaacaatacccagagctcatactgcatgcaactggggttaaaaagatgaacctagaaaaagtggtaataatgtcaaagttcattgtcatgcattaataaagagcaaatagaaggttcagccaaagctgccaataataagcaagggcaaaatgtaaaattataaagtaactatgcaaacatacaattacagaaaagtagggagggaggggaaggaagaagagtggaataaagggaaaacttaatcattctggagaaaaatataactaaacaaacagaaacaactttttttttctggaagggtttcatgctacaacaacaaaaaggaaataaaacacaagttaaaatagaatataataaaaccagagaatgaaaagagagatgatggagctaagaaaatgaagtgatatgttcttaatacaggctgtaatatataaattggaaacaggaggaaaatagagtcaatctaataaaggaaatttttttaaatgaatgcaaatgtacagaaaaaaggtattaaacaactaggtgaaagataaggaagacagataaaggtgatcctatgattgggtccctgaaataaggaacatttccatgaaggaagaattggatcgtctaatcaaaagggcacaccatatattaaggaacactcacacaatgcaaacatcatcaaaacatattctggttattaaaactggagtatgaataacaattatttaagtagtcaggcagaaaaagcaagttatgtgcaatgggggaaattctccctagcctcagactcttctgtagaagctttccatgctagaagatagagcaaagtcataagggaaagtaaatgtgactccaaaatactttacccagacaagttgttcaagtgtaaaagcaacaggtagatattctcagatatgaataaattaaaatttcaggaaatatagccctaatgagctcctctttaaaaaatactacttgaggccaggcacggtggctcacgcttgtaatcccagcactttgggaggccgaggagggtggttcacaaggtcaggagattgagaccatcctggccaacatggtgaaaccccgtctctactaaaaatacaaaaattagctgggcttggtggtatgcgcctgtagtcccagctatttgggaggctgaggcaggagaatcgcttgaacccgggaggcagaggttgcagtgagccaagatcatgccactgcactccagcctgggcgacagagcaagactgtgtctcaaaaaaaaaaaaaaaattactacttgataatgaaatccagccaaccaagagggaagtccaataaggaactcagaacaagataaaataaaataatgggacagtaagtattgaatccaattaaatatagaacttcaacaactgaaagaactgtgattgcagaacagcttgtaaatagtataagccctgatgaaataaaaccaaaacaagccaaaaaaataaaaaatgaaagctagaggggagggaaacggaacaagtggcaagataactaagtagctgattttataaggtcgtgagctcagtcatgttgtttaaaattgagatatggaaaaaagtaattcactaaaataaataaataaaataaaattgagatatggagccctacaagaaagcattacttcagtctcctagtgcatctttatactgtgtctgcttgccttaaagggatattttaggaaccaatatctcttatggcaaatacaggaaaaaaaatttaataggttttattattaaaataacatgcttctgtatcatctttttcttttttaaattttttattttactttaagttctgggatacatgtgcagaacgtgcaggtttgttacataggtatacatgtgccatggtggtttgctgcacctatcaacccatcatctaggtgatccttttcttttaaatttgtttctatctctgcacacctacacatccattcatccttctatctgtatatagatcactatctataattatgtccacaatgtatgctatcatcactcacctctaaacattgtgatttgatatttttaaaaatatattctttgtactgttttatattgcttgcttgtgtcatttttaaaaattcctgcctattaaaacgaattagagggtcactgatggtcgagaggaaaaggagaaagacagttggcaaactatttatttttgactctaacatgagactttataagtttcccatgtcagaactctttacaaggtcatcactttggtcaatttcaaattgatttgttattaaacatgtgctgcctatactgttccaacatgtaattctttctccttctgcttgtagtaaaacaaacccttgccaagagaacactgacagaagacataaattatcctgtgagttaaaggggcaaccaaggtttctattgtttgcagcagtggttaaggagctgttcagaggtagaaaacaaaaggatcctggtgacatgataatagctctgtgatactctgttgcaggctgctggatggtaactgtcctggccttctaccattcaacatacatgatcataccacgtgtcatcatccatagtccaaagtagaggctgagagagataatgcctatttttgaagtatatataaaacagcacaattctgaggctgtaggtcaagtgactcaggatcattttttacagacttataaatctgtagattactagcccactgtagatataactaataaaggcatgtgcctatggaaatgttcactagactgggaactaagtccctccctttgcaaaccggttggatcttgcccttagagataagaccaaagatctgcagaagggaagtttcccagcagacaaattgcaaaaatagtagagagttcacatatacccatcactgtttcccttaatattaatgttaatcttacataaccatagcacaataatcaaaaccaggaaattaggattggtaaaatactattaactacatatcttattcaaatttccccagtctccccactaatgtccttttcctgttccggagtctcaccttgcattcagttgttacttctctttagtcctctctgatatgcaacaattcctcagtctctatttgtctttcatgacctgaagacctttaaagactactgagcagttattttgcagaatgagcttcaatttggatttttctgatgtttcctcatgaccagattgaggttatgtagtttgagcatgaataataagaaggcacgttgtacccttctcagtgtatcatatcaggaggtacatcatgcccatatgtctgattaccattggtattaatcctgattacatgattaaggtggtattttgtttctccactataaagtcaacattttttccctttgtaactggtaaatatttttgacactatgccaatgtcttgcttctcctcaaatgatcacctactggctttgttatccattggtggatcttacctgtaaataattattaccgtggtattttcctaatggtgattttgtattttactccttccttctacgtgaattggaatccttcagtaaggaaaactaccttcttatattctatttatttattcatttaattgatatcagtatggacaaataaatatttattttatcctatgggttaaaatccattaatattgttatttattttgttgctcaacttgccccagatttggccactgggagctctggcagcttggatcctgtctccttttgacatgctcctatctatttgtgtaagtattttcttattttctggcaccacaagatgttccaggttcattttatattttccgtgccccaactctggaatcagtcacttctctaagaagccctttgagttccttttattggagaattgtgtttagagaacaaagtctgaatactaattatattcactgttagtgagctgtcattagttctagtcttttcaaaggatcaagctgggaaatacaggtatgtatgttaacctacatggtagacaaacatcaacgtctatttccatgtctatatatctctatactaaacactatgagttcatactagtacatctgagtctaatccaacacctcaaagttcatttcagccttccttcttctcttacttgtaaattatttctccaccaataagaaaactagcttttatctacaatagattcatttatttgttcaatcttgatcacataaatttgtcacagaattgctaaacaatacccctgtgaataatggtgttacaaataagtatagtgttagtgtattttttgtcattaaccttaaaatatccagttagaatactgttttccaatgttactatattagttatttattgctaaataacaaaattcccctagaacttagcaattgaacacaacaaaaagttttttcacaatttctgtgggtcaggaatctgggcatggctatgctgcatgcctttagctcctggtctctcacaaggctccaatcaaggtgtcagccaaggcagcatttatctcaaggctcaattgggagaagaccatcctaagctcattcatatggctctgggcaggcatcagttcgtcatgtcttttacctggaaacatcactgccttgtcccatacacctctccaaaaggcagctcacaacatagaagccagattctgtgtaagtgggcataccagcaggaaaggatacccaagacagaaggcacagtcttttcataatctaatttcagaagtaacatgccaccattcctgccacattcttttcactaaaagaaataatcaaatccatctcaaatttaaggagaagggattgcacaagggcatgaaagccaggaggtaaggatcattaaggaccatcttacagggtacctaccatagttatttaggtccattttcttccccagtacccttcagggtgactatgttgttcatttgaaatacaattaggttcatttgttactgcttatttcccaattaggttctccttcacctcatcttgcttgattttaattattgattcatttttggctggttgtgtgaaacattaccatggttctaagagtcagcactatatacaaagataaactctgagaagtgtcactgcctccttatccctattacctcattcccattcttccctttttcccatacatttatcacttagacctcgtaggcaaccagtctcttcagtttctgctttccttcctatatcttttgtacaaatgagcagatacatggttattttcttatatccctttctttcttacatgaagagtagcatattacagatagtctcttatactttgtttattcactcaacagtatatcctggaaattattccaaatgcattcattagagatctcccttatttttgacaggttcataacaccctattgtgtgtatataccatggttaattcaaccattcaggagagaaatttttgactacgcttttttgaccaagaaatactcctgcaaatatttaaagacaatttttcaagtgacaactggggaaaaagagtgcatcttctaagcatctctgcagattagaaaagcaatgtattaattctcattacttggtaggtataattagaatcttcacactccactggtagtcttgtgaattgaaacatcattttgaaagcagcacagcaatatctaagggtctcctcctttgactcactaattcaactcatgagaatttattcaaagaaaataatttaacaggggaaaatcttgacacagaaagatgttcatagaaaaaatgtatcatcctcaaaaccagaaaataatctaaatgtccaaaaaatggcctaataaatatttatcaatacaataaaatatcatgtgatgactaaaaactattatgcaaactatgcagataggaaaggttttgatacaatattaagtgaacaagcaggacataagatgatatattatgattgcaaagatgccaaatagaaaacagtagctgtgtgtagcctcaccaaagtgagatgatgctagtgaaagtggctgccttgccacatagtacatttccaagttcttcttacatacttgtggagccatgtgattgtgttctggccaatagaactgtgttaaatttatgtgagcaactttccttcctggtccataaacatcttctttgtggtttctttctttgtctgctaattggatgtcaacaccaggaaaccctgttttgaagatggcagaatctctgttagtttgagtctctgagtcccagaacctcacacataccattgctgatttggctttaataagcaagacgtaactatccactgcaataagccactgagatatcatggtctatctgttgtagcagcaagcattactttaacaccctatactatagtgatagaattagcaaataattttactttcagacttttctttaatgccaatattctaccatttgttgataatgaaaaataatgtaacacttcgatctgtaggaaatcattaaaaataagcaagtgagtcattagtactccttcatcaggaagatggttaatggaagcctgatgtctactgtacagcaaattattctaagcagagtttcagaatactcctgaataagggctagaaatattccttcgaatctcaaaatgctgtattcacaggactaccatggctagcaggaatacaataatctaggaaaccaagagcatcagagatttggggccgtaaaaatgactagcaatatatcaaagcatcaccttaatttaattgttgacgcaaagatatattagactgaacagctgctttgtgcctgtcagaaattggctgacctaaccctctagaccctgacaaaaggaggcaatgggactgtacatcattggccttaatatttgcagctacatctacaaacagcattgcttcttgttagaactcctgctaccagtttgccacctgtggctttgtgctgacagcgctggtggcttactacatcattcagaagtcagaacttggacaagctaaatgaacagctaaaggggctcacgccttttaaaaacccagatgaaagcccacgctctccagaaagccacccttacctctcttccacaactacagcaagaaaaaacctctgactcctataagctcttagaatttattcactatgtgttatgctcattgtagctatttaaatatacatctcatcttccctcttgcaatcttcttcagaataggaaccatgtcttttttatttacgatccaccccctccaccgtctcattttagggcctagaaaaggatcagacaagtcctccctaatcatttattgaatttgaaatatatttgtgaacatttaaatagtgtttcaactagaaaatgttttcacattagtaagccattgatctaaataggctggtgtgttgatgaacccaatatattatttatttgttttaatttaggaaaattttccatgcaaatgtctttcctgattaaactgattatactggccaattcagcctttccgataaataggacacttctttttttatattcagtaccaaatagttggtttgaatgcttttctttccccttgaggaaatcaattgtgcaaataattaattgttcaggctcattccctgccttatacaataagagttttcttttattgaatctataatagctctgacaacccattaagtgttgctaaactttcaagttacatagtctttgcaaaactctgatatatagatatcatatccatttgacagatagaaaacccccagagacattaactgattttccctatcccatgcagtacataaataacagtgccacgatctaaactcaattctgtctgattccaaaacccactaggccaacacttgtccagaaggagaaaaataaaacctgtgtctgagtagattctctgggtgaagcaggttctctcctttaaatgtagcaactggagcatcagagaacataatctggcaggcttaaattagcacagcgaattacgtttaatggaggagttgttgagcagatggggaagaaatctgatcaggtcctaggagaagctgaaaatggtgtgtgttgggagaattctagttgtggcaaactgaaccacacagggttatatgtttccttcccaaacaccataaagtgagagtaaaggaataaaaatagaaaaagtctacaagaatgaaacactattaaggaaaggaacattcagaaagcaaaatacactcttctagattgagaatttagcagcatattggccaggcctggtggctcatgcctataatcactgcactttagaaacctgaaacaggaggatcacttgagcccaggagttcaagaccagcctgggcaacatagtgagacctcgtctctactttaaaaaatcaaaaaattagccaggtattacggtttggctctgtgtccctatccaaatatcttaaattgtactctcataattcccacatgttgtgggagggacccagtgggaaataattgaatcatgggggcagtttccctcctactgttctcgtggtagtgaataagactcacgagatctgatggttttaaaacaggtttccacttttgcttctgtctcattctctcttgtcatggacatgtaagaagtgccttttgccttcaaccacaattgtgagtgatatggcttgggtatgtgttcccacccaaatgtcatcttgaattgtacccccataattcccacatgttgtgggagggacccggtgggagataatttgcatcatgggggtggttcccccatactgttctcatggtagtgaataagtctcacaagatctgatgattttatcaagggtttctgctcttgcatcttccttagtttctcttgccaccatcatgtaagaagtggctttcacctcctgccatgatcctgaggcctccccagccatgtggaagtataagtccaattaaacctctttttcttcccagtcttgggtatgtctttatcagcagcatgaaaatgaactaatacagtaaattagtaccagtagagtggcgtgttgctgaaaaaatacctgaaaatgtggaactgactttggaactgggtagcagagaacagtttggagggatcagaagaagacaggaaaatgtaggaaagtttggaatcttctagagacttgttgcatggctttgaccaaaatgttggtaatgatatggacaataaaatccaggctgaggtggtctcagatggagatgaggaacttgttgggaactggagcaaaggtgactcttgttatgttttagcaaagagactggcggcattttgcccctgctccagagatttgtggaactttgaacttgagagagatgatacagggtatctggcagaagaaatttctaagcagcaaagcattcaggaggtgacttgggctctgttaaaggcattcagttttaaaagggaaacagagcataaaagattggaaatttttcagactgacaatgcagtaaaagaaatgcccattttccgaggagaaagtcaagctggctgcagaaatttgcataagtaacaaggagcccaatgttaatcaccaagacaatagggaaaatgtctccagggcatgtcagagacctttgtggcagccccctcccatcacaggcccagaggcctaggaggaaaaaatggtttcataggccaggcccagtgtccctctgccatgtgcagtttagggacttggcatcctgtttcccagctgctccagctgtgactaaaaggagtcaaggtacagctcaggccatgccatcagatggtgcaagccccaagccttggcagcttccatgtggtgttgagtctgtgggtgcaaggaagtcaagaattgaggcttgggaacctccatctagatttcagaggatgtatggaaacgcctgaatacccaagcaaaagtttgctgcaggggtagggccctcatggagaacctctgctagggcagtgcagaagggaaatgtggggttggagcccccacacagagtcccaactggggcactgcctagtggagctgtgagaagagggccactgctgtcctccagaccccagaatggtagatccaccaacagcttggattgtatgcctggaaaagtggcagacactcaatgccagcccatgaaagtgaccagaaaggagggtataccctgcaaagccacagaggcagagctgcccaaggccataggagcccatcttttgcatcagcatgacctggatgtgagatgtggcatcaaaggagatcattttggaactttaagatttgactgccctgctggattttgaacttgcatggggcctgtatcccttttgttttggccaatttctcccatttggaatggctgtatttacccaattactgtacccccattgtatctaggaagtaactagcttgcttttgattttacaggctcataggtggaggggacttgccttgtctcagatgagactttggactgtggacttttgagttaatgctgaaatgagttaagactttgggggactgttgggaagacatgatttgttttgaaatataaagacatgagatttggcaggggccaggggcagaatgatacggtttgactctgtgtccccacccaaatctcatcttgaattgtactctcataattcccatgtgttgtgggagggacctggtgggagataattgaatcacaggggcagtttccccatactgttctcatggtagtgaataactctcacaagatctgatagttttatcaagggtttccccttttgcttctttctcattctcacttgccacagccatgtgagaagtgcttttcaccttccaccatgagtgtgaggcctccccagtcaggtggaaccataagtccattaaacctatttttcgtcccagtctcaagtatgtctttatcagcagtgtgaaaacacactaatacaccgggtgctgtggcacatgcctgtagtcccagctactcaggagtttgaggctgcagggaagtatgatagcaccattgcactccagcctgactgacagagtgagaccctatctcaaaaaataaaaaaaagaacttaatagcatatggaagctaaatttgagacaatctgatctccttagttgcagattggcaggctaggtaaactgaggaggagatgtaaaatcgtccccctttaaaaataaaagaattcaggtagctgtccaaacaaataactacagtcatagacctttccaggctgcaagcacaatagactctagagaccaatactacactaactctatatctacagtgtcgaatactgctttgttaactccccacacactcaactccccaacttcagatgttccaaaaaatgatatctcttctcccagctcaatatctggtttcaccttgaccagctcagtctaaccactgcctaaatgccttgattttggtgaagaacttcttaaggcatggaccagcagtctttggtatctgatatggtttggctatgtccccacccaaatctcaacttgaattgtatcttccagaatttccatgtattgtgggagggacctatggggggggtaattgaatcatgggggctggtctttcctgtgctattctcatggtagtgaataagtctcatgagatctgatgggtttatcagggatttctgctttttcttcctcctcattttcctcttgccaccaccatgtaagaagtgcttttcacctccctccatgattctgaggcctccccagccatgtggaactgtaagaccaattagacctctttttgtttccagtttcaggtatgtctttatcagcagtgtgaaaacaaactaatacagcatcactaactttctaggcaaggcaaaatacaaatccatcacctacaaaaaacacatccttccaaaatggacatttaaaatccctgcataatgctagccttgcaggacagaactggtgccagtttcaatggcttatcgtatataaagttgttctatttggggtgcatggtttggcctgcaatataactgaacatatgttatagtagagttgggtgtcatagagttctactacatttattcctgcagaggcaaggaaatctggtcctttactgtccctctagggttgagactagaagataaatttatagtccagatattttaattttaagggcttgggttaggcaaaaattatttttggagaatattccacattatgtcacacatagatcaattcaaggaagatttatgtctctcctttttgttacaattataactaagcaactaagctttcaaattgaaatgcataggaacttggatgatattccaagaactgagtgcttcagaatgttagatcatttcactgatcttgctttgcaatgtcgtaatggtagcagaccatgtgcatgcacatacacagaggctttgtgtagagtttatttgtgtagaattccttcagtctgtggttttattcctaaaattccacccagggaattagtaaagaaggttgtggaaagtgttatgtgtttgtttttagctttttgtttctttgttttggtgagatacattttgcatctcttagaaatgaaaatgaaaacgagaaattccccctgttagtgttcatgatgtcctcctccacaaagatgctttccaaggatcacagcaggtgcactcatcaacactgtcctgaacacacagctgtcccaggaatggatttgcaaagtgtaaagaggaataagaagcattttatcatcaacttaacatttactgcaaatattctctcacttttcaaggcttcaatgttagtactcagttggctatcatgatatttttttcttcagcagtataggagatatatgacctctcttggtctttatttgactagaaccaggtataaaattcaaagtatttaacaatcaatacccatacgtactgaacaatcagagaagatgcaggcctgagggctggaggtagttgctgaagatcccttctttaccataatttaaccccccttaattgctagctgggcagagggcggtagaaaaggtctgtcctgtccatgcaaagcagctgaatatagccctgactggaactgaaaattaggctaaagcaataaaactgacccaccaacgtcagtatagctagatagtacagtggtaccattgccactggtaaaggggaagctcatgatcatagcagtggtaatggtaataattatagtaccagcaggagaagcagcagcagcaatcaagctattgtcaattgaggatttggcagtgagctagcaatgaaagagatatcattctctggaacatctgaggttggagagttgagtgtctggggagttgacagagaagtattagaaactttggacatttattatttctaattgtcaaagaaacttgccaggcaggaaatacctacaacctgtagatacagacacaaagtttcagaaactttaagtaactggctccaagtcacatagctagtacaccacagagccaagactggaaccaaggacactccaaagcctgtgctatttctcttatgcaataccagccttctcccatgcaaaagtaaaccaaggactactgccatctacctggaggctacaatttcatgacttaattcttacacgttcttataaacttataattctacaataaacttttagaaatgtttactacaaggactaataaatttcagcagtaaaatttaagaatgaccaaaaaagtgatataaccagtgttttcaatgttaggtcactctacatgtttcttatttaaagatagaggtttcaaccatttaagacagccaaacttccccctttcttccaacctttagtaattttcatgagaatgtttagatgctgaacttgattgacagtgtagtgactgatattcttctcataagtaattcatgctcatatttaaactttggaaaacacagagaaatataaagaatataaaagtcacccacaatcccattgcccggagataacaacagttaaaattttgatctctttttttccaatcattttactatgcctatatcagcacatatacacatatagacacatgcaaattgagatcatataaatattgtcaaatgaaatgtcatattatgagcattttctaatggccattaaaattctgagaaacacaatttaaagctttcttaatattctaacatatagatgtagcataatttatttaaccattcccctatctttggagaacagcaggccttggtcagtaaataaatggttgtataaataacaggatctgaattaaatgcagaagattaagaaccccaggttattccttggtctctgcaagttaatggaatccagagaggcaggacaatcaaatgcaatatttttagccttttgaaggatccatccatatacatatatatttagcctttgttgccgacgtgttatgctgaaagcttccccagagcaaggtgtttaatgcagaggcttattgccagaatggtaagagtcactctcacatctgtatgggtccaaaaccagcactagagaacacaagggggggaactccattggtcccatcaaaatccagctctatgaaaagtacatcatggtttttaaataattcccttcaaatccatgatatgtaacaaacctggaaatttgagctaaaattgtcaatgatttcatttgttttttctatgctctaagtaatgggccatttttttgttttgcttccagctttattgaagtataattgacaaatcaaaattgcatgtatttaagatatactatgtaatgttttgatatacatatacattgtgaaatgattaccacaatcaagctaattaacacatccatcacctcacatagttactgttgtgtgtgtgtgtgtgtgtgttgagaatacttaaaatctactctcttagcaaatttcaagtatgtaatagattttttcttttttttttttttgagacagagtcttgctctgtcactcaggctggatgcagtgacacgatctcggctcactgcaacctctgccccctgggttcaagcaattctcctgcctcagcctccctagtagctgggattacaggcatgcactgcccacctgatctttgtatttttagtagaaacggggtatcgccacgttggctaggctggtctcgaactcctgacctcaagtgatctgcctgcctcggcctcccaaagtgctgagattacaggcgtgagccaccatgctcagccgaattattattaactatagacaccatgctgtacataactgcaactttgtaccctttgaccaacatctccccatttcccccacccgtgccccggtaacagccattccactcatgtttctatgaacttgacatttttagatttcacatataagtgagatcatgcaatatttgactttctgtagtaatggtctggttttaatggggggatttctggctccagaaagcataaacagtaatttcttgcagctattgacatacagaggtgactcactcttctccagatacattattaaaattaagaaaggattatatttcttactggtggctttgaattgaggaggattttgtgatcaaacacagttcaggtagaatagacatgggatcagaatcacctaggactcagaaaacagctgagacactcttatggaacaatgttttcaaaggatggtgagccagaaacagctagaagtacaccaaagcatagtgatgtcattgagaaatgacagcctagccagtggctacatttcacagttctttttgcatctatgtggggccatgtgactagttctggccagtagaatgaaagcagaagtgaagtacgtaccacttcaaaaccaagtgtcaagtattctgttcttgcactttcccatctgaaatgaccatgaagactcattattgaagatgatggcattgtaagatggaaggaagcagcatccttgagtcagcatttagaagatagccacccaagacaaatgcctgaccaagaacatcaacactggattttgtgcaactgagaaataaatgtttattgtgtcaagtcattgacattggagggttgtttgtgaaagtagtctgcatagcttgacagggactcattaaaaaggcctctgccatctgagcacctgatttggaagagatagagcatgggaaaaagataagtgtggagcacttcttcaagatgaagaacacaaatcatgcaaacacagggcaaagagaagacaaagcaccaagggtaatagtaacaggaaatcaaaggctaatcaaaggttaagtccaccaaaaaataaaggtggtggaaggaagtctaaaatcaaaaagggttgttatatgacttgggcttttgattttttccatggcctacatgaccaattaaacaatagttacaaatgtatatttctgtcaacaagtggcttttttactttggtatctgaatcatttccgttcccctaaataatctcttttttttttggttgatgactcttcactgttgattttaggtcacactgtaattcattgtgttctcctgaaattttggttactggtacaagcaacaataaagacatgaaaaataatttgagattttgttacatagattaaagatgttaatgaaagcttttttgatcctaagcaagagcactcaggatttttcagttagctatagactttttagacatctgctatcgttcaccatgacacaaagctgcaccattctgtttactgatatctcgagtgttaaatgctccttatattactctctgaggataaaagaatgttgaactgaaataaagtgttagcccttgccttctgctgaattactgagcctcatttccgcctatctatctgtctatctgtctgtctgattgtctgtctctcagttttaagccctaataatgacctgggcagggaatatactagacactaaaataaatcctgattaggacacagtcttatgggagccccagtcatgccaaaaggtgggatctagagtgtatcttgctgccctcatatggtcctgggtctgcttgatgtttactatatccagtgctctctcagttctttacagcctgggggcattttttcctcaacatctgggtcaaaacctggtacacagtaaatagtcaacaaacgtacattgagtagaactaagctctggaatgctcagtcatgattgtcatggaacactttatgaattattaaagtctgtttgtgtgggcatctgcctcactttctgcctagggctaaatatcagccctgcaaaccagccatacccaaccccagcactgatcaggcccctcttatgggaagttggaccctgttttcagtacctactttttaattttttaattattttatttatttatttatttatttatttatttatttatttatttatttatttattttgagacagagtctcactcagttgcccaggttggagtacaatggcgcaatctcagctcactgcaacctccgcctcctggattctagtgattttcctgccttagcctcctgagtagctgggattacaggcgcccacaactacgcctggctaatttttgtattttcagtagagacagggtttcaccatgttagtcaggctggtctcgaactcctgacctcaggtgatctacctgcctcggcctcccaaagtgctgggattacaggcatgagccaccacgcccggccatcagtaactacatttatcgctttagcaccttctccaaagaaccaaaagaaattatctacttgatttaaaagcatcactcacttctgccacatgaccctctctcgcccacccacacacatacagactggaaccttgaaggtttccacgcaggctttactcaaggaaaagtttacccgactccattaagtcttccattttccattattggatagccatgcctctagaacatggtctataactctgcttttcctgttaacttttcccactatttccacagcttttccttcaatacctgctcactgcaaaggctctagtaagtcccttatagagtcccctctcctctgctccccaactccaaggaatgacctaaggctagctggagaaacttttcaaatgatctcggctacctatcagacctgaggtttgcactatgcaaataactacacacataattagaaacccatagaatatggttgttttctaccgaaaactcatttgatccaggatttactgaaggtagaacaactgcaaggaattaaggtaacacatacctgtgaatataaataaaatgaacgagagagggaggtggacatggttataaaacaacaacatgagagatccttataaggacataactgttctgtatgttaacagtatcagtgtcaatttcctaatcatgatattgtactacagttctttcaagatgtcaacactggggaaagtgggtacaatctctattatttcttacaactgtatgtgaatctataattttgtcaaaataaaaagttttcttaaaattaatgaatgggagtaaaagaaattagccacttttagaatttgctcttaaaggttctgtgtagatatgcaaaaaagcaaaaaactttagctgaaaatgactgaattgatttgctggtaaggaaaatttctataagattcaggttaggcaattctgagtaaagaaaatgaagaatgagtagaaaaaaacatagtggcagaaccttctggaactcaccaggatttgaaccatgcaacttctgataataatacaaataaaactctccaaagcaaaacatttaatcatgtcagttcctacattgtgcatgtcataatgatagctacaagtgtaaaagaatagcctttccattctaccttattccatttaaaagtctagcatatgaaatagtaaaatgaacctcacattctctgttataagttaggtgagataaaccacaattaaaaattgagatgcctgataaccagagaaagaagtgttaggctgcaacccaagagtcaactaaataaatccctggcattaacttggaactgtctctaacagttgcaatataattcaaattattaatgacatgatagctgatgtgttgcaatcctctcagtagtgatgctaagttatactcgccacatgtacattcactagaaaatcatcataattaattttagtacagccccgagctatcattagtgataaatcatgataatgattacattcaagtttaatgttattgactacatgaattataatgttattaacaaattagattgaacgtcttatctaaaactaatgttctaatggggagaagtaaacccctttccatctgaagcccagagtaacttactggttgccagtcctgtctccctattaactctggtggtgtaaggtggataaaataagaagtaataagtctccaattcaacagataatcaggcccttcttcatagtaaaaatgaaggataaccttgcatttcccacttgcagagtcattagccaaggcttccagcttcctggagagagatccagagagctgacattatgggcacctaataaactgaaatatccaggtctccaagtcgatattacaagagtagagatattgccagaaattaaaagtttcagggtaagtcagaacaggaagaacatgtgctcacccagctgcaatcagccatcactgccagggagggcctggtaaagaatccataccccggttcacaggatagaaccagggacagtcatgtgcacatttccccttcttcatctctggccccaaggctttcacttattttttatcttggactatctgtttcattgcaagtcacctcaagtcattttttgaatgaagtacagatgaaaggataaaaataaatgtcaacagtacactagccttgcttgctgaccttgtttgctgttcttgaaggcctatatctgccttttttcattgtggcatgttggcagcttaagttgtgaggttgtgaatcgccattgatcaattgctgatttggacatgggcatttatgaagaactgtcctgatcagaaaataacccatctagtcctttctgatcccttcagttcaccttttttgatccagttattatggttcttgatatactcataaacaataatagttaacaaatatcctctgagtagatactatatgccaccaggcattattcaagtgctttacgtgaattatctcatttaatccttacaataagcctccataataggtactgttattattccaattttacagttaagagaaccatggtacatacacacaaaattaattgacttacctagtggagctgtattcaaacccagttctgtctatgtgactccatccctaaagctcataggtacttcctgggtagggttgcccagctaaatttgaatttcagataaactgttttttttaatcattctcaatacttcatcatctttgccttgttttcttttttaattacaaaagaagcagatcaccactaaggagagtaaggactgaaaatacaaaagggttcatgagcaatagagacacatctatggagggtgtgaaaattgaaaggtgggctttcagatggaatgacacacacaaagacacagaggagataaaaatgagctaagttttctcactgctcttaggagttcttctccttactctccagcttctattttccccaccaaaaaatgactgagcagcctatgttttgaataatttttccttttcattaaatcaattcagtcatggtagtctttaggcaaatgagccttaaaagcattatcgctaaaaactcttcttccactgattgctgacagaccaacttctacaacatatcaaatacaaagtgtccaaggcaaatacaacattttctctagaagctatagctcctcaagacaactttatgtccaaatctaacattttttgcaactataccctataccaacacagaatatcaatccgtacacatactcttcattgtgtacctccacacttttttgattttttttctttttcattatttttttttgagacaggatctcgctctgtcacccaggctggagtgcagtggtgtgatctcagctcactgcaacctccgcctcctgggttcaagcaattctcctgcctcagcctcctgagtagctgagattacagttgcatgccaccacgcctggctaatttttgtatttttggtagagatggggtttcaccatgttggccaggctggtcttgaactcctgacctcaggtgatccacccatcttggcctcccaaagtgctgggattacaggtgtgagccaccacagccagctgcttctttgatttttgttactccttcacattcacatttttgagcctggcatcaggtgtcatccacataccctgtaccatttcatctaatccttataacaaacctgtcaaatgatcagtattatcatccctattttatacgtgatggtaagtcactggagtgacttaccaaaaaaacacacactagtgagtggcaaagcttggttggatttgaactcaaatcttctggctcaaagccccatattctttcaactatacacagcttctcttggatgccaagtgcctccatttgtaccctactccaaattttcacctaagaaaaacactttgtaaggttcatttcaaacagtatctgctccataaactcttcactgatcatccaataaaaaatgaactctccttactttgatttctttaccatgttctttgtccactcagtcattcaataaacaactgagcacctactgtgtgccagcttctatggcaggtgctaaaggaacagcagtgaatgacacaataaggatgctgatctcattgcatcatatattttatggtataagtcagagaatcatagtttccaatttcatgtcatctatagcccttattttacagatgagtaaactcacatacatgaagttcaggttcatgccattataggcaggccccagaatagaggccttcacctatccttcccattaacgttgtttatctccatggcttcttttccctactaggctgccaataacttgagggcaggaactgtgttttaatcatctctgtacattcctcagcattagcacagacattcaaaaaaatgggtgcaatgtgtgataatggtggcaaacaggaaagacagattatctacactcttagagctccaatggacaaaagagctagatatttaacatttaaaagtatgttacaatttcaagtattccctcacatcacttttcagcaaaagagctttcataaattacagatatacactgctgagttaaacttgtggaaagtatcacatatttccaaaatggaaaatgttgttttctgctataatagcctttaatccctcattgttttctcccttaattcaaatcccaataattataaatagcacattaatacataacttatctggaggctacatagctatcaacttcgaccatgaggaagtcatctaaaacacaaaaagacgcagagaatccctctgagcagccaaaatacattttaaaaaatacaggcattaaagaaatgtattgcttctttagtcaatatattagatctttactgtttttattcaatgcatacttaccgagtgttcatgctttctctgtgtctgaaaatcaccctgggactcttaactcttatttggggcacaattctaatagacatatacatctaattttcatgactcacagccaatgaaaagcagcaagcagaaggtggataaggttggccagaagcaggctactgtatcccattttcctacttcattgtaattcctaccaccacaggcatatgtcaacaataccaaagaatgaacacaaggcagcgtcagcctatggattactatatttcacatttaggaaataagttatatataaatacactgtggaagataacttgggttccttcttcactgcagccaggtaatgatcaggcagtaatggctaatgaaagaaatatttatttttctttctgtatttaaaagacaaaatcatcaactatgcataagtgaaggattttgtttccatgagactcaaattccctctccttaaattgttctgcttttgagcagaatatacgtggattactttttaccagcagagggaggtgaaaaacaaggaagctctgaacatttctctcttcaccacagaggttaagtctttttgtaatgtgactgattggctccctttagcagcatggtctaatttagaaaggtcaggaaattgtgtttaacgtctactgagtcaacaaacttaggaaaaacacaagtggcaaaaagaaaacactctcagcaggattggcccttatgcaatggctccaaggagaagagccgagggagaagcttagcaatgtctgcaccactgcacactgacaagaaatcctttttgccatgaaatcacacttcgcatatttttacagtgtgaagacatatacacttcagctcagagagagtttactctttgttgcaatgaaactgatgaaataaaggcttttgttgttgtttttacatgaatatcatcagggctaaacccaacttcttggcaggactagggggaatgggcagagggaggccatctcctaccactgctactacccctgaggtccagcaaatatgggcatgagggcctggggaaaaaaggcatatcatagagaaaagaactttcatctgaagaatgcaaggctttttaagttatgaggcccagagagacattaaaatgagaccacaatcccatcctatcccccacgtgagctatgaattcatctcaaaactacgtgtttttgccacaagtagctataaattaatctaataatgccacactggacactataacccacaccctatagcctaccaacatataccaatcactaatcaatgttacttctataaaccagcgagaattcctgacaaacaactttgtatcaatccactccttgttccccctttttgcctttaaaaatccacttgcgaatgctgccaattggactgtatattcagggcaatttgcatctatgctcctggttgcaatcctcaagcctggcccaaataaactctaattatattaattttgcttcagcttcttccttttaggttaacaccacttaggattctcccagggaggcttattcagcttattcaggtgtataaatctaattttcctgccccacagccagtgaaaagctgcaagtagaaggtggaaaaggttggccagaagcaggctattccatcctactacttcattgtaattccaatagccacaggcatatgtcatcaacgctaaaaaacgaacagaaagtaacaaactgggaagcacagtatgatggttaattttaggtgtcagcttgactgcattaaagaacatctagagaactgtaaaacatcacttctgaatctgtctgtgagggtgtttccagaggagattggcatgtgagttcgtggactgagtggggaagatctgccctcaatgtgacaggcaccatccaatcagctggggacccaggtagaacaaaaaaggcagggagaagactatttccccctctttctcctgaagctaggacactcttcttctcttccccttggacagcagaacttcaggctctttggcctttggactccaggatttataccagcaccctcagttcctgctatgggttctcaggccttgggctgagagttacaccatcggcttccctggttctgaagcctatagacttgggctgaactatgctaccagcattccgggatctccagcttgcagatggcctgttgtggaactttacagcctctatattcatatgagccaattcccctaataaatatcctctcgtatgtctgtatttctattatatatcctattggttctatctctctggagaaccctgactaatgcacacagtacaaaataactatcagacaaaaccacaaccaaggaaaaagagaatcatgctttaaaaaatgcaaattttgtcaaattatttgcatcccctgagaaacaaggacagggatagcaaatctagaggaattccaagttctaacataaatttgctgtgtgaccttgaacaagtcacagtccctctctttgcttcaatttctccatctgcaaattgagaaaatagtatggactagagaatctttcaaatagcctctcagcctaacactctgagctcagtgattcaattgccagattgaaaatatgtaagtagcattatcttcccaaacaaaggttatcacatgaatttgtttgttcatcataacaaagacaggtcaatgattataattataattataataggtcaactgtcccacatgaaccctgctcaatttccagctacataattatattgaggaacaggaacacttgctactttgagctgatagcaaaattcctctcctctctgggagagaactgtttctatttaggacaaagaccatacttagttatgaagatgagtcccctgggcagaacctgcatggtctgggctgagaccaacttaacagctaaactgctctaaacaagaaatgaaaataatttgggtggttggaaggaaatgtgctggaaagggaaagagaagaggtggaaggccggaacaagaggccctgcagcacaatggacagctaaatcacaagtttaagggaaatctggtactagtgttgctggatcaaattttactgggcatcttgtattttcacttcaggtgaacaaagaataatttttagtataacttttccaaatattgcttgagacatactaaaaaattcatttatcagaagttcagattttactgggtgtcctgtatatttatttgctaaatctggcaagtctaccagtggcagaaatgacaaacattttaggaacttcaatctgagattgtttagctatactagggtataacctcccttagggctaccactaatccataaagcatgattacattaattagaaaaaggtgattcttcttcccagtacctacctaaggcacaggcttaatgagtgtggttcacgggttagatttcagcctcgattctcctctaaatcctgcctctcttccatgtcttcaaacctttagcaaagtcttctgtacatggccctaggttaagggtatggaagacagtgaatgaaggtctcctggccccagagtacaagatttgcatagagaaatgcaggaaaagagaagcaagcttatttcaggatatatgcctcagaggaaaggtcaaggattcagtggccacaggcaatagcatccagagtgactgagtaagagtcctcagaccttgccaaaaatcctgagatattagagaggttgtaggctgcccattgtatattgggtgagaattagagtcaataatcagggaaagggtaaaacctgaagatggaacaatttggaatataaatgtggttatataactaaagagggaagtaggcagttcatgaagatttagagatcatggagaaagaggaactcctacttatactcaagacccaggtcaactgttacctgctctgtaaagctgatggttctaggcagaatttattcatttttctttgtgctccaattctcctagcacctgtatctgttagaagccacgtggaaaaaaacaatcagaatataaggtacaagtctctctgtccctctcctctctccctttctccattctcgctttctgtagaagcagattatgagttatttgaaaacaaggactaggccgggcgcggtggctcacgcctgtaatcccagcactttgggaggccgaggcgggtggatcacgaggtcaggagatcgagaccatcctagcgaacattgtgaaaccctgtctctactaaaaatacaaaaaattagctgggcgtggtggtgggcccctgtagtcccagctacttgggaggctgaggcaggcaggagaatggcatgaacccgggaggcagagcttacagtgagccgagatcacgccactgcactccagcctgggcaacagagcgagactccatctcaaaaaaaaaaaaaagaaaaaagaaaacaaggactgatatatcaattttataattgatattatataattattatataaatttattaattttatataatattaatatttattaattttataaattaataaattatta

SEQ ID NO: 501 - DNA, 201 bp, Homo sapiens
ggcattttggttttcctggaaaacaggagtagaaaaatcacatcactcaccctccttctctcacctgccccactttacctgtcccgccttgtaattcaggyatcacaccctgcgacgggccttcatctgccaagatggtccctctgccccacaggtgatgctctgagccccacctgagcatctccaaacccagtccagatc

SEQ ID NO: 502 - DNA, 201 bp, Homo sapiens
tgggcacctgctggagctccagagccccagctccctcaccccccgccaccagtgccttgatcagtgcagtccctgaggccacgtcagggagtgtttccagrccgtgtccagagatgccccagtagaggtgacaggtgacttcactcttggttctgggaccttctgtgtctggaagcgactaacagcttgggacccagaatt

SEQ ID NO: 503 - DNA, 201 bp, Homo sapiens
tgactgaaccacaatatctcagggaccccataaatatatacacctactatgaacccataaaatgaaaaacaaaatacttcttagaaaacaaatattttctytcagtcggtggcttatttattcatttttccttaatttttcttttgaagggaagtgttaatttttataaactctaatttatccttataaaaatgaaaccat

SEQ ID NO: 504 - DNA, 201 bp, Homo sapiens
cacaccaggtaatccacctcgctgaggaagcgccgctcgcagaagtcactgatcatctccatgcggcgcatggacacgtcctgccagcgcttgtaggcgcscacctccagcactgacagctgccgaccggtccccagcgtcacgcggggcaccgcggccggctggtcggtgaagacatagtagtggacacggtggcccacc

SEQ ID NO: 505 - DNA, 201 bp, Homo sapiens
aacacagttaacccaatggtggtgttctggagcctgaactgctcgttgaggatgtcgatgttgaatgtgccctcccagacaatgggagccagccaaggggkaccacgaggacatccttcctactgcacatggagagaggcgtgcggtcacatggagctggcagggtgccacccacatgcgcctctggcacacggccgcccc

SEQ ID NO: 506 - DNA, 201 bp, Homo sapiens
cccccgagtacttgtgggaccagcagctgctgggctggcccgccgtcctgaggaagctgaggttcactgcggtgcccaagaaccaccaggcggtccggaacccgtgagcggctgccaggggctctgggagggctgccggcagccccgtccccctcccgcccttggttttagcagaacgggtaaactctgtttcctttgtcc

SEQ ID NO: 507 - DNA, 201 bp, Homo sapiens
gggacggggcctaggcttcagttactcacaacaggacggacaaaggaaacagagtttacccgttctgctaaaaccaagggcgggagggggacggggctgcyggcagccctcccagagcccctggcagccgctcacgggttccggaccgcctggtggttcttgggcaccgcagtgaacctcagcttcctcaggacggcgggc

SEQ ID NO: 508 - DNA, 201 bp, Homo sapiens
acggcctcgatgccgttggcctggtcgaccatcatggcctggtggcaggccctggtgagccgctgcacctcttgcaccgaccccccgaagaacccccccakgtagtagaaatcgccctcgtccttggggatgtaggcctgggactggggccggcgctcgtaggtgaaggcctcccggctgcttccgtagaagccggggtgc

SEQ ID NO: 509 - DNA, 201 bp, Homo sapiens
gtgccacacggcctcgatgccgttggcctggtcgaccatcatggcctggtggcaggccctggtgagccgctgcacctcttgcaccgaccccccgaagaacscccccaggtagtagaaatcgccctcgtccttggggatgtaggcctgggactggggccggcgctcgtaggtgaaggcctcccggctgcttccgtagaagcc

SEQ ID NO: 510 - DNA, 201 bp, Homo sapiens
ccgcagtgaacctcagcttcctcaggacggcgggccagcccagcagctgctggtcccacaagtactcgggggagagcaccttggtgggtttgtggcgcagyaggtacttgttcaggtggctctcgtcgtgccacacggcctcgatgccgttggcctggtcgaccatcatggcctggtggcaggccctggtgagccgctgca

SEQ ID NO: 511 - DNA, 201 bp, Homo sapiens
ccccccaggtagtagaaatcgccctcgtccttggggatgtaggcctgggactggggccggcgctcgtaggtgaaggcctcccggctgcttccgtagaagcyggggtgcagggtgccgaacagcggagtcaggatctccacgcccacgtggtcgcggaactccatgtccacgtccacgcacaccaggtaatccacctcgctg

SEQ ID NO: 512 - DNA, 201 bp, Homo sapiens
accccaccgagcttcaggatgcccaggctgtttccctccaaggcagggggtgactcttcccaacacccgaaacgtggatggggcaatgggcaccaggtggrtctggggaggggagcgaaagtggcctgaggggccctgcagtgggcaacactcacatgaaggtgaacgtggcttccaacttcccaccgcccagggctgtca

SEQ ID NO: 513 - DNA, 201 bp, Homo sapiens
gccacagttacagagaggagggggcagcagaagccaccatccctgggtgagacgcagcctctggagaaggagctgggttttaccgacctggcgagcccacragcccacgagcccacatgagctcagtaagatgctgcatgaatgacctttcccatctaccctctgggaggacaaggctggccgccaccccactctgtcttg

SEQ ID NO: 514 - DNA, 201 bp, Homo sapiens
ggagggggcagcagaagccaccatccctgggtgagacgcagcctctggagaaggagctgggttttaccgacctggcgagcccacgagcccacgagcccacrtgagctcagtaagatgctgcatgaatgacctttcccatctaccctctgggaggacaaggctggccgccaccccactctgtcttgaacacaaggagagacc

SEQ ID NO: 515 - DNA, 201 bp, Homo sapiens
atgaatgacctttcccatctaccctctgggaggacaaggctggccgccaccccactctgtcttgaacacaaggagagacctcaatgtccacagtcactcgmcactgcctgggtctctaccctcggccacctcactgacttacttcttgatggcaaacacagttaacccaatggtggtgttctggagcctgaactgctcgtt

SEQ ID NO: 516 - DNA, 201 bp, Homo sapiens
cctcggccacctcactgacttacttcttgatggcaaacacagttaacccaatggtggtgttctggagcctgaactgctcgttgaggatgtcgatgttgaaygtgccctcccagacaatgggagccagccaaggggtaccacgaggacatccttcctactgcacatggagagaggcgtgcggtcacatggagctggcagggt

SEQ ID NO: 517 - DNA, 201 bp, Homo sapiens
gaggtgggcaggagggtggtccctgggatattgctcacgtatgggcacctgctggagctccagagccccagctccctcaccccccgccaccagtgccttgrtcagtgcagtccctgaggccacgtcagggagtgtttccaggccgtgtccagagatgccccagtagaggtgacaggtgacttcactcttggttctgggacc

SEQ ID NO: 518 - DNA, 201 bp, Homo sapiens
ctttcaacccctgagcgggagcccaagtcaccaccctcagctgacacaggaggaaaacgacgctcagaaggtccagtggcccaggcagcagcaaagctgcratttcgaggccgacttggttccaaagcccaagcttttaaccgtcacgctataggacaccatgcagtcctccagattcgttatattttttattatttattt

SEQ ID NO: 519 - DNA, 201 bp, Homo sapiens
aaatcatttacagacattcaacaagttaattctgttataaatgataggccatatgtatgttccaacctgcttccttttagtactaggacagtgtagtaccrgcacttcagtaagtgttaactttattttctaagtgtttaaatatgttttgttttgttttatgaggcggagtcttgctctgtcgcccaggctggagtgcag

SEQ ID NO: 520 - DNA, 201 bp, Homo sapiens
catctgttacttcttatcttataatgcttgtgtgtgtttacctccacctttctaagtcctgtgaccacggagcgatttatctcgaatagcttcttgaaacmgaaacgtgggaggcaaaacatttgaactttacatgtcctaaattattttttccatttttgtagttggtagatcgtttggctgtagggaaatcttggtgga

SEQ ID NO: 521 - DNA, 201 bp, Homo sapiens
tttcttccctcaatggatatccagtcatttcagccatttgaattgaaaatactttcctttctctatcacattaccttagcacccttatcaaaaagcaactmttaaaaaatcaattgactatttctgtgtaggtctatttctaaactctgcattctattccattgaactatctgtctatcctaatatcaacctattctgatt

SEQ ID NO: 522 - DNA, 201 bp, Homo sapiens
ggatatccagtcatttcagccatttgaattgaaaatactttcctttctctatcacattaccttagcacccttatcaaaaagcaactattaaaaaatcaatkgactatttctgtgtaggtctatttctaaactctgcattctattccattgaactatctgtctatcctaatatcaacctattctgattactatgtaaaattt

SEQ ID NO: 523 - DNA, 201 bp, Homo sapiens
caactcaatttttaaaaaggcaaaacatttcaacaggcatttcaccaaaaacatatacaaatggctaaaaagcacaagaaaagccacttgccatcatttgwccttggggaaatgcaaatcaaaactataatgagataccaccttttacccacaagaatggtatgtattgctgcagatgtacagacagtggaaccctcagcc

SEQ ID NO: 524 - DNA, 201 bp, Homo sapiens
tatgtgtctgcggttgcctggctagctccctctctggcctggcccagagtcccagggccttgtgggtcagccacttcctttggtgtctggggccaactgcyttgcctgccccacctacatctgacagagaagtgaccacggctctgccagcatcctctttctagggtccaaggacagcaaacaggtgtccccctcctgcta

SEQ ID NO: 525 - DNA, 201 bp, Homo sapiens
agcaaacaggtgtccccctcctgctatctctggtcagtgagcaggaaacatctggagccttgtattgagggggtggctcagcatgacggccggccacagtyacagagaggagggggcagcagaagccaccatccctgggtgagacgcagcctctggagaaggagctgggttttaccgacctggcgagcccacgagcccacg

SEQ ID NO: 526 - DNA, 201 bp, Homo sapiens
tctattccattgaactatctgtctatcctaatatcaacctattctgattactatgtaaaattttagaatcagctgtcaactttacaaaaatttcttctggrgttttaagtgagattatgtggactctgtagatccatctggggagaagtgacagtttagcaatgtaagtcttccaatccatgagcatggtatatttctcca

SEQ ID NO: 527 - DNA, 201 bp, Homo sapiens
ccagcctgatttattcattgactttgtatcttgagaccttgctaagctgacttagctgatgggctcacagcataaacatatataatatatatgacaataayagcataaaggagcaaggaggcaatgaagttattatatatactggagcaaggaaaggtcaccagacaataacttgaatatacaggaagaaatcaagagtaa

SEQ ID NO: 528 - DNA, 201 bp, Homo sapiens
ggaccagagcactgtcccagatctctccaaacctgttttcccgtgggtgaaagaatgacccgggaagtatttaccgttccttcctgagaactcagcgataytgaacacagtgctgcctcacagtaaacactgacaaatggtgagcattactgagggcagggcctcgacctacaccatacccagttttcttcatgaattttc

SEQ ID NO: 529 - DNA, 201 bp, Homo sapiens
ctctgctcctggccctgccagagccgcagctagggctacagggaaagcccagagggtccacccagggacaaacccgtcacacctggtgtttggggtcaggkgttcacatttctaaagcaaattgaccagtgggagaggaaagtgggcttttagtggagtcaggggcagcaggccaaaaggccaccccaaaaaggcactggc

SEQ ID NO: 530 - DNA, 201 bp, Homo sapiens
aaagagacttagtgtcatggaagatagtaccaacaaaatcaatgaagacagaaaaattagaaagagaaattgaggtgttacagatagattcagtctccatyctggagctagtaataaaatgagtggaggaaaccatccagagtgcagcagctctgaaaacacaacacacacagatatacacacacacatgcacacacacat

SEQ ID NO: 531 - DNA, 201 bp, Homo sapiens
tgtgaggcaaagcacggtgcccggcttggatgccacatgtgttgagccagctgtgctgtggacagggcgctgtggacagggcacagcagacaggcgggggrtgtaggcatcgggagggggagtcatggctggtgagagcacccctggagcgggaagtgctgggcagcgagaggtcagggaggcatgggggcttgggacggc

SEQ ID NO: 532 - DNA, 201 bp, Homo sapiens
aaaaagaagaagctctgagaactaacatcaggaatggttaatgaaacgtagaagttaaagtcatgacagggaagattgtagaagtatgaacatcacaacaytgggagaaatgaacgaggtttcctatggttgaccagccaggaagccagtgctgctgagttggcatttaactctttagaatatgcacgcgttgacaataca

SEQ ID NO: 533 - DNA, 201 bp, Homo sapiens
ctttgtgcctctctggcccaagatcagacactctcaagtacttactcaataatactaatgcacactctaataaaccctggggctgtaacgaacgggctggygtgacccagtccctcacccctcccacggcaagtgctgccgagcagaaaccccccaccctcatccccccgggcaggaaagaatggggcctgggctcttcag

SEQ ID NO: 534 - DNA, 201 bp, Homo sapiens
ggtgggggagggtgggggtgggagtgggggaggggctcacaggcgctgtatttgccaggctcctccgtcttccgcatcaggattttcttctggatgcacckatcctccctcctggaaaacaggagacacgcgggcagcggctcccaggacacccatggcccatcctcagctcacctggtgcatggccctgacccggcaacc

SEQ ID NO: 535 - DNA, 201 bp, Homo sapiens
attccagggatggaaacctggtacaatactcaaaaatcaaccatattaatatgttaagaagaaaaattacatgatcatatcgatcaatgcagaaaaagtayttgactaaattcatcacgcattcaggaaaacaactctcagaaaagtaggaatagaagagaacctccttaacttgacaaagagcatctacaaaaaacctat

SEQ ID NO: 536 - DNA, 201 bp, Homo sapiens
ttccctgcctgctggcctctgccctgaccgtgggccagctgtggctgggacaacccagcaaacttctccagcttcccttgggagaaccacaccttctcccrtgaggtctgaacccagacttgtggaaaggatccccacccctgtttatttcttccttaactgccctcgtgcaatcctgagccattctttgtggttctcttt

SEQ ID NO: 537 - DNA, 201 bp, Homo sapiens
gggagctaacgagctcagctggatcatggcagctttatgcctggagggaatttcaatccaccacagagagaggaacccaacagagcaaggagtcagacggmgtggacgggacacagattggactctaggcatcgcagacgactagaatgtgggagacaaggaaagagataggagagccctctgcagaggaagagctccaga

SEQ ID NO: 538 - DNA, 201 bp, Homo sapiens
tttttgtccttgggatagtttgctgaactagaaataccatttgatccagcaatcccattactgggtatatacccaaaggattataaatcatgcttccataragacacatgctcacgtatgtttattgcagcactattcacaatagcaaagacttgaaaccaacccaaatgtccatcaatgatagactggattaagaaaatg

SEQ ID NO: 539 - DNA, 201 bp, Homo sapiens
ctgcactgcggctcctcctctgtccctggggttccgtcctccttggtggcctgcagggcctctgtccactgccgggccaccaactaggctacagagacacrgtgacggtcaggtttctcaggtcccccgggctaaggaacacgtgagcctttcagccaccacgttgaccacacatgcgacaaaggcagaggggccgcctgg

SEQ ID NO: 540 - DNA, 201 bp, Homo sapiens
gccaccatgctgaagcatcagttacaaaatggacttgatttgctgtgtgagtgggtcagtgcagtgcaaggggtggctgaaggcactggtgacccacgctstcggcccacctgccacagttgtagatcgttcctggtgcacggacgtattcacagcttcccaccttaagtgcctgcaccttttcttctgtgcttcccctga

SEQ ID NO: 541 - DNA, 201 bp, Homo sapiens
atcctcagtctgtagggatagtaactgatgggataaatggtctggactcttccttctaagtggaacaatcaaatatggttccaccctatttctcagatggycctcagaaggactgagtcccagttgcccacaatggtaacatcattaacatattttgttggtttttctaccttccaaatctcacttgatctcagacttctg

SEQ ID NO: 542 - DNA, 201 bp, Homo sapiens
ggttgcagggtgggggtacgggacccacccacgagcttcgcccctcggatcggcttcccgtgcagctcaccctcacagtaaaagatgtagtggtccttcaygtgcgacctgatgatgtatgccacgtgcttgcccctgtctgcagaaggacagcagcatagtcctgaattagccaccggggccttcagagaggatcccggg

SEQ ID NO: 543 - DNA, 201 bp, Homo sapiens
ctcactttgttacccaggctggtcttgaactcctgggctcaagcgatcctcccgcctccacctcctaaagcgttgggattaaaggtgtgagcctccatgcsgggcattactttttaagagcatatataacttagccacgagaaaaacagcagcatttttcagcaacaacaaaagggagagagatgagagaaaggcccccag

SEQ ID NO: 544 - DNA, 201 bp, Homo sapiens
ttcctggctctgagaagttgctgaataaaacctgtcctcaccgctttaactagcattcagcttggctcactggtgacgacgtatccaaaatgccgtatttmacacattggcttgagcggtagagcagctctcagatggcttccaggactggctgagctggtgttgaggcctcattcacaggggctgggacgccaggatggc

SEQ ID NO: 545 - DNA, 201 bp, Homo sapiens
ctacccccccacatccagcgtgtgtttgagtttaggctctggcttaggctccgggactcactggccgtgtattttcccggctcgtcagttttctccaggaygaccttcacctcctggcactggccacttatcctggaaaacagaagccccctggcaaagcggccctgacctgtgcctcccccggccctggagcagccacgc

SEQ ID NO: 546 - DNA, 201 bp, Homo sapiens
gctgggcagcgagaggtcagggaggcatgggggcttgggacggccaccagccacatcagagcagcactgctgctgattcccagcaacatggaatgaggccycttggcaaagtaacagaacgtatctttgaaatggcagcagctgatctttaaaacagaggcaagccgttcctgtctcaaaacgtttaaatcctcaccccaa

SEQ ID NO: 547 - DNA, 201 bp, Homo sapiens
ggagggtagcaggaagttgctgtccacttggactagcagaatacacaactcaagtggagatttattctgacattttccagaacaactctaaaacttcttayttactctttatgccatctacaagacacaacacacatttattgtctcaatgttaagaaaactgagaagccagcactaaagtgctaacatggaagggaaagt

SEQ ID NO: 548 - DNA, 201 bp, Homo sapiens
gtgaaaggctaaagtccctttcttccctcaatggatatccagtcatttcagccatttgaattgaaaatactttcctttctctatcacattaccttagcacycttatcaaaaagcaactattaaaaaatcaattgactatttctgtgtaggtctatttctaaactctgcattctattccattgaactatctgtctatcctaa

SEQ ID NO: 549 - DNA, 201 bp, Homo sapiens
aaatttttaaaaatttaaatgatatagagggtagtctctgaccacatggaatctaactataaatcaatgccagaaagataatggaaaatctttcttcagakgcttggaaacaacacacctgtgaataatccacaggtcaaagaggaagcctgaaggtaaatttaaaaatatactaggctggatgaaaatgaaaatacaaca

SEQ ID NO: 550 - DNA, 201 bp, Homo sapiens
tgggaaggccagggtggggccaaggatctcggagaccagggtcggctctgccttgctctgggggtgatgatggaggcgccagtgtccctctctccagcgcycctctctccagtgctgccactgagcccaggctgctaaaatgggggagcttggaggatccctctgagacccctgaggcgggagccctgcggtggccccact

SEQ ID NO: 551 - DNA, 201 bp, Homo sapiens
ggccagcacccagctgccccttcttagagcttttgctaaaaagggcttacacctgtgactccttcctctgccactttgagaagtctgtgtttctcctacartgcagaagtgtatttctcaggctggctgcagtggctcacatccgtaatcccagcactttgggaggcataggtgggtggatcaattgaggtcaggagttca

SEQ ID NO: 552 - DNA, 201 bp, Homo sapiens
cccagattcaagtgattctcctgcctccgcctcccaagtagctgggattacagatgcacaccaccatacccagctacaggctaccctttcaagactcattrtatagctagcagatggacagatgcatagatcaatgggacagacaataaagaatcctcaaacagacctgcacgcatatacccagttaagtttttacaaaga

SEQ ID NO: 553 - DNA, 201 bp, Homo sapiens
tgtctcaaaacgtttaaatcctcaccccaaaccattatgcggctcactgcacccgtggaaagccaacatcaatacctgcgtgcatgctggcctccctggcrtgggcattctttgaggttgctggctcaaagcccccagcactgccagagggggaaaccggcaaacccaggaactccaaggctcagctcaacagccacaccc

SEQ ID NO: 554 - DNA, 201 bp, Homo sapiens
gcccacctgccacagttgtagatcgttcctggtgcacggacgtattcacagcttcccaccttaagtgcctgcaccttttcttctgtgcttcccctgacacygatgaaacccagatgtgcaagtgaatcagcatcctcagtctgtagggatagtaactgatgggataaatggtctggactcttccttctaagtggaacaatc

SEQ ID NO: 555 - DNA, 201 bp, Homo sapiens
cgttactgtcacaatattttctgtggagttgaaaagcaaatgccccaaggcaagcacagagggtgcaggggttggggtgtcccgagggtggggctgtgggygggcctggaccccctgcactgcggctcctcctctgtccctggggttccgtcctccttggtggcctgcagggcctctgtccactgccgggccaccaactag

SEQ ID NO: 556 - DNA, 201 bp, Homo sapiens
gtctaactagtgaaatagcattaatgaaactcaaacaaatttccactgataacatttcagagtgcacgctatagtcaaacagcaatgttataaatacctaygcagaaaagaaacagatagggtgattccagagaccacagagtcttaagttataaggtaatttcaaatttcccaagggttggtttacaaaatggtttgaaa

SEQ ID NO: 557 - DNA, 201 bp, Homo sapiens
cgtcagatgaactatgtatacgtgggaaattatgattaaagctttacgttcaaagtcaagtaatagactatttttaaaaatacatggtaaggagaaaaaartgtctatgttgaacaactgagaaacacttaagcgaggttacaaatgactaataactatgcacaacaatcttttccaggatcaactttttcctttgcaaaa

SEQ ID NO: 558 - DNA, 201 bp, Homo sapiens
gagaccgtattgcaaaggtataaagtggtctacccaacaaagtattttacagatgatggcgatgaaagcaaggattaattctaattagctaaatctaattygttcttcagaggagagacttgtctgcaaggttgcaagggagggtagcaggaagttgctgtccacttggactagcagaatacacaactcaagtggagattt

SEQ ID NO: 559 - DNA, 201 bp, Homo sapiens
acatggaagggaaagttgtaagaggtactagggtatgctaataactccagttttctactctccatgcctgcttcagagagccactgcttctccttctcggrccacagggaaggctgggagtcccccagcaacaacaagggcactccccggcgattctgtcccttccttaaacttcgctccagtcttggtcgacgtggacgc

SEQ ID NO: 560 - DNA, 201 bp, Homo sapiens
gagagaaagattttttgtttaagttagaaaaggtaattttctctaatactaacacacgaaatgtcatatagctatgttaacatcagataaaatggactttytggcaaagagcattcattacaaatgaagagggttactatatagtaagaaaaattttattaccaagaatatataaaataatttctgtaactcaaaggaaaa

SEQ ID NO: 561 - DNA, 201 bp, Homo sapiens
gacagaaggattttcttcctttccttgagttatggtggacatcattgaataattcatgggctttttcctaattctccttagtccttctagaacacaggtcmacagatgtttgcgacaccagtccccatgatctgagtctaggtcccagtggggatccatactggggatggcttgctgaccggtagggaatttgtccctttc

SEQ ID NO: 562 - DNA, 201 bp, Homo sapiens
tgctttccagccttgaaatgtcatttctgtagttctctcctgttctctttgttcttacaggtttatgcattaaactactttattgcagttttagtgggacyacaagagggagcaaaaaggaaatgtttgtgtataatccttgacctttacctggaagctctccttccagtgttttccaggaatgatggggcctggaaaaag

SEQ ID NO: 563 - DNA, 201 bp, Homo sapiens
ctattgcagatgacaaactctgtcattcccaaacgttgctgagtactggagtcatttgcggagctattaaaaaatacaattatgggtccttatccccaacstggaattagcaaaccaggtctccagtttcagagatttggacttaatctcactaaaggaactcatggttccccaataataaaataatgatagtctttaata

SEQ ID NO: 564 - DNA, 201 bp, Homo sapiens; identical to SEQ ID NO: 176

SEQ ID NO: 565 - DNA, 201 bp, Homo sapiens; identical to SEQ ID NO: 177

SEQ ID NO: 566 - DNA, 201 bp, Homo sapiens
ggcggccaagaggggtgggcagatctcattgggggtggcaggattgtaggtgcagcagcagcagcagcatgcggggagggttgcatgtccctcagagtcaytaagtgtagcgaagcgaagggggcggcttcacgcagcccaaagtcccctgcatctcttgccaccagtctgcgtcgcgttaccggcccggcgggctgttgg

SEQ ID NO: 567 - DNA, 201 bp, Homo sapiens
ttcaattaggttccttggatgaacaagaaacaagtgtgacattttgtgtggaatctgaaaaccaccttagcatggctttacatcggatgcatcagttttcsaaaaagccagagaactgtgttctgttgggggagaaaaagataaacattctaagagaaacaatcatttcttaaatgtggtaaatagctaagccaaaccaaa

SEQ ID NO: 568 - DNA, 201 bp, Homo sapiens
aataattattattataggagactagagagacatgacaactaaattaaaggtgtgattcttgattagatcctgcataaaacaaaactcatgtataagagatmcttctgggtcaattgggaaaatttgcatctgagataaatgttgcatgatatcgttgttgttatgttattagaatggtttggattattattgttaataatc

SEQ ID NO: 569 - DNA, 201 bp, Homo sapiens
tctctactaaaattataaaaattagctgggcgtggtggcaggtgcctatattcccagctacttgggaggctgaggcaggagaattgctcaaacctgggagrtagatgttgcagtgagccaaaattgcaccactgcactccagcctgggtgacagagtgagacaccatttcaaaataataataataattattattataggag

SEQ ID NO: 570 - DNA, 201 bp, Homo sapiens
ctgaggtgtcaaagttaggcatgctgactatctggtgctatcaaaatgcagacctaattattgtgtatatgagtagtgcatgtgtacataaatatgtgtaygtatttcctagctctgtctgttgaagaagacctagaagcagtgatgcctctgtatcaatgagcactacacccagacacaatgcagaccttgatttctttt

SEQ ID NO: 571 - DNA, 201 bp, Homo sapiens
tatatttaaaagccttaactattttcatagaaatgatagttctttattttcccagccatcatctgccctccaccatccatacctacgtttgcaacacttcrtgtttataagccatcagctggaaacaattccctctatcgggacacagcagtttttgaatgtttgccacaacatgcgatgtttggaaatgatacaattacc

SEQ ID NO: 572 - DNA, 201 bp, Homo sapiens
cttactccgtcctgcaatagcaacatggcagagaaaactcgagaacaagatgagcactggagaaatcattgtggatgagtcacactggcactaccaaagtkgttttcgtctgctaaaaagacagagccaaatatgaaagcgcttaaacattaaccattttctggtgtacttttatctttgtaaatagaagataaagtatca

SEQ ID NO: 573 - DNA, 201 bp, Homo sapiens
agagttggagcagtagctggaagaaagatgtgaagtaacagggcttctttttttaatgggtgatattactgtatatctgtatgctgattgaagtgttccartagaaaggaaaaaataaacatggataagcattaattagaggagtaaaatccttaagtaggagagagaaaatgggacctagcacataaagagagggtttgt

SEQ ID NO: 574 - DNA, 201 bp, Homo sapiens
gtcagtatgctgaggcttaaattggctacgtatcttacagaggagctttacacatggcaatattaaagaatcagtatcaatccagtccctccagcatccaytctaaagagaatttagttatcagctgggcgcagttgctcacacctgtaatcccagcactttgggaggctgaggcgggtggatcacgaggtcaggagatag

SEQ ID NO: 575 - DNA, 201 bp, Homo sapiens
gatctcactgtttgcagaagttcctctagttaagtggtgacagtccctgatataccaatgccacacatatccaagccacttccaaagcactatgagagcaytggagtcaacacacccagaaatgactggcttagatagagtaatgaccgcgaggtggagaatacagaatgtgtccgtgagtaaaatgcttcccttctgtca

SEQ ID NO: 576 - DNA, 201 bp, Homo sapiens
ttaataaatgaatgaatgaattccagagtgggaggaagatgtttgtttgatctcactgtttgcagaagttcctctagttaagtggtgacagtccctgatakaccaatgccacacatatccaagccacttccaaagcactatgagagcattggagtcaacacacccagaaatgactggcttagatagagtaatgaccgcgag

SEQ ID NO: 577 - DNA, 201 bp, Homo sapiens
aacataagaacgtccttccctacataagcaaagcccagagatgactctgacagcttggctgaggatcctctgaaaaaacaacagtgctttttggaggaatrccaatcagctcctaggatgcaagcccctttgatgggctgttggcttactgtgagggtgactttcctcctcgtctgtcccgtaagtcactaggcttactct

SEQ ID NO: 578 - DNA, 201 bp, Homo sapiens
gttttaagtgaaaactgtaggaaccatcgtgattcctactgctgagtgaaaattttacttaatttgtcctttaaaaactttcgtttttgcttgttcaggtyttcttaaacaattatttatttgaaattgctttactttccacttgctttttttttttttttttttttgagatggagtttcactcttgttgcccaggctgga

SEQ ID NO: 579 - DNA, 201 bp, Homo sapiens
caggtgaagtccaaagatatgatgattccccaaattttgtttttccaaatgtctctttggcatcagttgacatttcaaagcctctccactgttcttttaayttctgtagtgtttctttctccttttgccacaccagatctcatttttaaacctaccctagtttcaggctatgatcttctcctcttctatcaatagcaccta

SEQ ID NO: 580 - DNA, 201 bp, Homo sapiens
tgcaccccagcctgggcgacagagtgagactctgtctccaaaaaaaaaaaaaaaaaaaaattagaacaaaatgcaaactccccatcctggtctactaggcsctgtgtgatctggctctgctgacctgtatcagcagctttctcccttttcctacttttcatccaagtattcatttactccaggactgttcttcaaggtcag

SEQ ID NO: 581 - DNA, 201 bp, Homo sapiens
acaaggggcaggtcctggggaatcccttgtaaaggatgagatgggagggatgggctctgggtgatgtagggagagagatggagacagaggcagagagagargctggagccaggaacacagccaccataggagggtcaggatgaaaggagcaatgataccagagcaaagcaggatgcagacagactgctggcttcttccacc

SEQ ID NO: 582 - DNA, 201 bp, Homo sapiens; identical to SEQ ID NO: 180

SEQ ID NO: 583 - DNA, 201 bp, Homo sapiens
tctccgtcgatcttctcccggaggacccagaatgcctgaagttgggagggatggctgagggaagagtgccagggcaccaggtgtctatgtgtcaggccagragttaggcactggaaatacacaggagaacaaaccccacaggaatccctgctcttttggaacatcacttctgtatgggtaatttttattctttcttcctcc

SEQ ID NO: 584 - DNA, 201 bp, Homo sapiens
tgaagtggattgaggggtgaggccagtggtgtcaccttgggatgaagaaatgcttgcccactagtccatcaggataggcttcttgaaagagtagcaatttygggaacaatgtgacaggtgagacagagggtttggttataggaaacggttattgagcatgtgctgtgggctggtgcagctctagaaaataagggtgaagag

SEQ ID NO: 585 - DNA, 201 bp, Homo sapiens
ttggtgctcagcacatggctggtgctcaataaatatttgttgcatgaataaataaatacaatgaactgcctcaagtgtgctaaaatctcaagaaaacagaygtccatcaagtagaaccagaggagaatgggccgactttgtagccagaagtgcatggttagatatggtaaaggacttcccagagctatggggccctcagcc

SEQ ID NO: 586 - DNA, 201 bp, Homo sapiens
gtctcaaaacaaaaaaaaaatcaatcaataaataaaaataaagaaataaaataaaaaataaaaataaagaaataaaagatttaagcatcatagcataccaytggtgccttgtcaagcatcaattcatgccatcttttgtagggtggtaagtcaagatttatggtgtaccatggaactgcacctctgtacctgtaatgagag

SEQ ID NO: 587 - DNA, 201 bp, Homo sapiens
cagattgtttttcctgccttatttttccatcattctccagagaaggcaggaacgagagtaattccacttggatgacctaacctgacccacaccacaaaaayatcataacaagcactccttatctctctgcacgaattcaccctctagccactggcatataccgttcttaccatttccttcccacactcacagagataaacc

SEQ ID NO: 588 - DNA, 201 bp, Homo sapiens
ttgtttttcctgccttatttttccatcattctccagagaaggcaggaacgagagtaattccacttggatgacctaacctgacccacaccacaaaaacatcrtaacaagcactccttatctctctgcacgaattcaccctctagccactggcatataccgttcttaccatttccttcccacactcacagagataaacctgca

SEQ ID NO: 589 - DNA, 201 bp, Homo sapiens
gagtgtaacactattgccaaaccaatgtctccagtgttgccttcaggaagatcaccttttaagccccagatggcaacatgtattatcttcccacgatcagyttcaagaaccttcatgattctgtcagccatcctaatcttccctactatatacctcttctcttctcattttcctggacaaagtccaagcccaagctgtatt

SEQ ID NO: 590 - DNA, 201 bp, Homo sapiens
ctagtccaagtgacacaacacacacatatacaaataagagagcaagtgctaggcatcccgtgagcagtgggaaagaaatgctgaatgggactcagatggaytcaggggtgatctggctatcagttcctttatcttcagcattgatttgactagtcatgctggccaaacaggttatctttttcttccctcatatctgcccat

SEQ ID NO: 591 - DNA, 201 bp, Homo sapiens
tatacaaataagagagcaagtgctaggcatcccgtgagcagtgggaaagaaatgctgaatgggactcagatggactcaggggtgatctggctatcagttcytttatcttcagcattgatttgactagtcatgctggccaaacaggttatctttttcttccctcatatctgcccatggatgctgcccaaatctacgcactta

SEQ ID NO: 592 - DNA, 201 bp, Homo sapiens
ttcattatgtcttttagtaagcattttatttatttttcagctaaaggttatagtgaattctctgaagaatatgataaatacattcgtgccaagtggaaaarttatgcaggtggtggatgaaaaattggtaagagatattatttctcacaataaatgttaagcacatagaaaatgcgctgttatttatttaaaggcataatt

SEQ ID NO: 593 - DNA, 201 bp, Homo sapiens
gcctcatcctcttttgctcctgccagcatttttttgttttgaggaagtccggtaagtatgaacataaaggatagcctgaaacaaaagctccgagagcatgmacgtgagggataatgggtttggtgcttggcaggtacaagtgtcatagggaggatgtggccacagcactcagccgctagggcaatgattctcgaccacggg

SEQ ID NO: 594 - DNA, 201 bp, Homo sapiens
tagtcccatccccttttacgaaaccataatttgctatgctgtaaccctaatattaccaattccccaaatttaagtccctctgaagttctgacagtgagctrgattcatgcagatttgcccaagtccctgcgaagaggttgctgaattatgcctttaaataaataacagcgcattttctatgtgcttaacatttattgtgag

SEQ ID NO: 595 - DNA, 201 bp, Homo sapiens
gctagggcaatgattctcgaccacgggagatttggtaacatctaaggacatttttggttgtcacaactgagggggtgttaccagcatccagtgggtaaggrccagggacactgctaaacatcctgcaatgcacatgacagccccacaaaaaagagacacccaccccaggccgggcatcctgagctgctaaacatcctgcaa

SEQ ID NO: 596 - DNA, 201 bp, Homo sapiens
catttttgagacttagtgtttgcaatgtccatgccattcataatatcagcaacatcacctgaacccacatggctacctaggtggcatggaaactagtccargtgacacaacacacacatatacaaataagagagcaagtgctaggcatcccgtgagcagtgggaaagaaatgctgaatgggactcagatggactcaggggt

SEQ ID NO: 597 - DNA, 201 bp, Homo sapiens
cattaatgcccaaaatctgccatcaagagcaatgaggatccctttaacagttctaggggccaggccctaggtgtttcattggttctgcgtcaacaaaaacrgggctgagaaatggagtcttcctgcatgatgaggatgaaaatgaaatggtttggtgattgcacagaaacactcagcccaaatgagtttcagggtcagagc

SEQ ID NO: 598 - DNA, 201 bp, Homo sapiens
gcacattttacctctcgttaaacagttttctaaaacatttcagtatttaacttgtgcgcctccatttccccataagaataaaagagtatccaccttataayagcagggaagacactatatgaaaaatgcaaaaataaaaaaaacacttagcagcattggtattcaatcaacagtagtcatcacaatttattttcctacttc

SEQ ID NO: 599 - DNA, 201 bp, Homo sapiens
acctaatttgaagacttactataaagctttagtaactgaggtgaaatagtattgatataagggaagacaaaaagacaaatatgtaaatgaaacttaattcyccaaacaaaacaacatatatacaatcacctgattgtatatacagatacacattgtgtgtgtgtgtgtgtgtgtgtgtgtgtatatatatatgtattgtat

SEQ ID NO: 600 - DNA, 201 bp, Homo sapiens
gtagggggccactcatattctgggctcctggaaccaatcccgtgaaagaattatttttgtgtttctaaaactatggttcccaataaaagtgactctcagcragcctcaatgctcccagtgctattcatgggcagctctctgggctcaggaagagccagtaatactactggataaagaagacttaagaatccaccacctggt

SEQ ID NO: 601 - DNA, 201 bp, Homo sapiens
ctttcctatccttcaaggactgcttcaaatgtcaccacttttgctgagacttcagggagcaccctccctcctgcactgtgttctgaaggcacctttagcaygacaaaaatggaactctttgtttatttataagagacagggtctcccttttttgcccaggctgatcttgaactcctgggctcaggcaattctcccatctca

SEQ ID NO: 602 - DNA, 201 bp, Homo sapiens
gcagtgagccaagatcgcacaactacactccagcctgggagacaagagtggaactccgtcagtaaataaataaatataaataaaaaataaaacgccagtaytgaaaagaacttttgggttcactccaagaaaccgaggcctggaaaagggaaaggggctcttgcaaggctacttggtatcagagccaggcccagaacttgg

SEQ ID NO: 603 - DNA, 201 bp, Homo sapiens; identical to SEQ ID NO: 183

SEQ ID NO: 604 - DNA, 201 bp, Homo sapiens
cccaactttatgtgctagtaatttcatccaggagaacctgtgctttgctgcttgatctctttctaccttgggtcccttatgcttagcatgttcttgacttytgaattctccagcaccaagtgaaagtagacgtatccctgtgacatctggctgtagaggatcctctatagggtcttcagaatatgggctggaatgctctgc

SEQ ID NO: 605 - DNA, 201 bp, Homo sapiens
aatgccccattatttagccaggagacctaacatgttctagccagaagaaattctcagaatttctgaaaggttacttcaaggacaaaatacctgtattcctygcctgtccagggatctgctcttacagattagaagtagtcctattagcccagaggcgatgtctctcatgatgtccacgtcactgtagtatggtcttgttaa

SEQ ID NO: 606 - DNA, 201 bp, Homo sapiens
tctgtgaatcagatatgataccagtgcttagtcccattggcatcctacagtctatgaaaaacagaaaaaaaatgaataatttttgcttagaaaatatatayaataaagtaaaactccatggttagggattatgtttctgactcaataattagatatttttacctaccttgtgtggccctgacttaaatatatctgattata

SEQ ID NO: 607 - DNA, 201 bp, Homo sapiens
tggcagtgttaagagcacactaacaggcctttagctcctaccatagtgttccttcctttaccatatatgtaccccaaatggagctgcttcactacattgtmgtagagaaaagcataaagagaaaaactgattcatagataggattgtcatgtatggtttcataggctgcatgctgcacaactgtagggggtaccattcaca

SEQ ID NO: 608 - DNA, 201 bp, Homo sapiens
tattctaggatttaaggttgatcatgacaaataatataagatactagctttgcatattcaccttttggatggtgtgtgtgtatacatgtgtacacacagtrggaaaattagatctgtttatctgagcagtaacctcccctcatcacttggcaggagcattggagagagtgtttcactcacacattaaggtggaaaatggaa

SEQ ID NO: 609 - DNA, 201 bp, Homo sapiens
ctgcatggagagtccctggttatgataaatgcagactgttaaccacacccttatgcattcctcatgaaaagcaagacagacatttgacaagaaataacccygactcttccatttggtggacttcagattacgaggttaggggaatgagaaaaactttcaatgaaagtacctactgggttcacagctgagtagtaggcccaa

SEQ ID NO: 610 - DNA, 201 bp, Homo sapiens
cttttgcatgtccacctgcaatataggaaagccagtaaacagaactgtccttgtcaacaagtcacacactgcctaaattcattatacaatcagctttcttyagaactaaagagctagcacataagatcttagcaaactgatacaatgactacatgcaattcatatttgggcacagagtacctaaatttgaatcccaactca

SEQ ID NO: 611 - DNA, 201 bp, Homo sapiens
aaggttttttgtttttgtttttttttagacagggtcttattctgttgcccaggcttgagtccagtggcacagtcatggctcactgcagccttaaactcctytcaagtaatcctcttgcctcagccttccaaagtgctggcattgcagacatgagccatcatgcccaacccagaaaattttttatcctattagctcaaaatg

SEQ ID NO: 612 - DNA, 201 bp, Homo sapiens
gaggatgtgagtctccaagaacttcgggacttcttttcatagtaccagctcttcttttcatcaaaggtcataaatagtaagacaaattctctcatgtccayaggcatgttgctgtccttatgtagtattcctttttggcagattaggaggggacctatcaagcctgagtgaatatctttttcctggaaaaacagagtaaat

SEQ ID NO: 613 - DNA, 201 bp, Homo sapiens
ctgggtgtctcagaagcatctcatgtctaatcttgtgaatatctaagggcagaaatcactgtgacccagtgtgatttaattaggagattagatcaaagtcygaggaaaataccgtgaaactcatgggattttttcatttctgaggatgtgagtctccaagaacttcgggacttcttttcatagtaccagctcttcttttca

SEQ ID NO: 614 - DNA, 201 bp, Homo sapiens
agtgtcttggcttaggtgtctcccaactttatgtgctagtaatttcatccaggagaacctgtgctttgctgcttgatctctttctaccttgggtcccttaygcttagcatgttcttgacttttgaattctccagcaccaagtgaaagtagacgtatccctgtgacatctggctgtagaggatcctctatagggtcttcaga

SEQ ID NO: 615 - DNA, 201 bp, Homo sapiens
ggtgagaaggggctttctgaggttctgcaaggttattgacagtgaacttactaatattacttggggaagaataatttgaaccaacaattatatctgtgttygaagaaacgaattcagtgccattctccagagctagggcagtaagattgaactcttcttcttcctgattcaatgatgagtttcggaatgacctgattccta

SEQ ID NO: 616 - DNA, 201 bp, Homo sapiens
aagaataatttgaaccaacaattatatctgtgtttgaagaaacgaattcagtgccattctccagagctagggcagtaagattgaactcttcttcttcctgrttcaatgatgagtttcggaatgacctgattcctaatgctgcagccagtctgttctggtaatcatagtcagcatcactctcttcatcttcaggttctaaac

SEQ ID NO: 617 - DNA, 201 bp, Homo sapiens
ctgtgtttgaagaaacgaattcagtgccattctccagagctagggcagtaagattgaactcttcttcttcctgattcaatgatgagtttcggaatgacctrattcctaatgctgcagccagtctgttctggtaatcatagtcagcatcactctcttcatcttcaggttctaaacgatcatgcattttccgtgtagccatga

SEQ ID NO: 618 - DNA, 201 bp, Homo sapiens
tcactgaaaatgtagtgaatgcttacacaggtatagtagattatattttaaaatctagaatagcttactttagaatcagggttctttctgggtttttgaaygtgagcggttagcaaaaatggcggaagtaaactttgttataaaagcaagttataatcgtgggtctggacacaagattttgaaagaaattaccagaactag

SEQ ID NO: 619 - DNA, 201 bp, Homo sapiens
atttttcataagaaaatgctagagagaaatgatatgatttagggttaaacaatatgacagtttgtctgggttgtgtttctatggttttgactcaacaattsctaccagaggaacgaatctccagaactttggaaacttacccacaggatgaggggacagaatgaccagtcatggttccctgtgtactcaccatgtgaatca

SEQ ID NO: 620 - DNA, 201 bp, Homo sapiens
aatggtggaaggagcatggcctgtttactgggagaatgggattctagtcctgattctgctaccaaactaagctaaaattatttaatctcctgtgtatttasaattaaaaggaaaaatctagaccagatgctttgctccttgctactgtaacattctgtgattccatattgggccagaatgagtttcaagacacagatatca

SEQ ID NO: 621 - DNA, 201 bp, Homo sapiens
tgaggtgcgagaatcgcctgagcccaggaagtggaggttgcagtgagccatgatcacaccactgcactccagcctgggtgacagagtaagacccttggtgrgggggaaaagctacttgcttgagaggcacagacaaatagccagatcctgaacttttaataaggtatgtctacacttgctgagagcacataaaagggatca

SEQ ID NO: 622 - DNA, 201 bp, Homo sapiens
ctttcttctggtctacctcccctactaatcccatctttccagactctgagcataacatgcaaactcacagaacacaagggagtgggtaaagcaactccgamtgccataaaagtgggttgtgagccttgaatggaatacaagattttgaaggtggttccatccctattcactctggacaggccctgcatctcactccctcgg

SEQ ID NO: 623 - DNA, 201 bp, Homo sapiens
ttgctgcagggttatctgggaaataattggatagcattctctctctatttcacctgttttacaaaacacaacttctctttccccctgttaatgtcaaagakcagaaatagttcaatttcttctaatatttcaaataaatgtaacatttgagagacctgataaaaccataagtagagcttgatacacagtacagttattgtc

SEQ ID NO: 624 - DNA, 201 bp, Homo sapiens
ctttctagtggcctaatttaaggataggccctggaattctatagaaagccaggaaattggagtgtaggtatcttaagggagggagatatgaggatagaaaktagggaatttggatttagttggctgaagggatcatcaagttattcatgccattctgatatctcaggtcatttaaagaattaataaaaatgagtcaaatat

SEQ ID NO: 625 - DNA, 201 bp, Homo sapiens
ctgataagaccctgtgaatctggctgaaatactacatgtgtggtcaaacccagaaaagatgactgaggagagttttggaaatgggcgcgtggtcataagastaaggtatctgatccttgccaaatccctgcagagaggctgggctttttatgtagagaaatcaatgacccccagctatcggtttttcctggaaaagactct

SEQ ID NO: 626 - DNA, 201 bp, Homo sapiens
gcaaggagatatgcagcatgtcaccttaaggccttctaaattcagagaaagtttcaggcaaattaggaagtctaggagtttataaaattaggagtttatcrttggtgtatccagcaaccatagcaagtcatgtttattctcttattggtatgacaactcctctgcccacttctcagattagataactagggttctcaggct

SEQ ID NO: 627 - DNA, 201 bp, Homo sapiens
agtagtgtaccctgtacccaataggtagcttttcatccatcccccgttcccttttgagtctccaatgtccattataccaatctgtctgccttcgcataccygcagtttatctcccatttgtaagtgagaacatacagtgtctggtttttgattcctgagttacttagaataagttttttaaatattgtgttaaattatcgt

SEQ ID NO: 628 - DNA, 201 bp, Homo sapiens
tattcactctggacaggccctgcatctcactccctcggggccttgcttagaaatactcaggtagctagttgttctcatgtggtattgagtgcaacatttawataggaagtcataggaaaaggtgttttaaacagagttctaatgtggagatgtcaggcatcagattaatgaactcatatgcataagtcacaccatacattg

SEQ ID NO: 629 - DNA, 201 bp, Homo sapiens
tgagctctatccccacaaataagagacatttagatgtttctaagtaataattcacgaggacaattttgaatctctgaaatggcatgcattgctggaacatyaaagatttcttggtgagtctccaatagttaccattgttggtgtctactgagtgctaggcacttggcgcatattactattttaatggtcaaagtaactctg

SEQ ID NO: 630 - DNA, 201 bp, Homo sapiens
agggacactgctgtaggcaatatttttatttacttatgtactaagcatagtaaaaaaccaaaggtatgatttctacaagggcagggctcatgtctacctcsattaccactcttagccttagtaccagtataatgactggcattaacaaatatttaaatacctacttaaatcacttaagtgactttaataatttacatgatg

SEQ ID NO: 631 - DNA, 201 bp, Homo sapiens
acatttctctcagactgccatggcagtgcttttggccactgaactttagaactgcagcaaatgccggaaccctcattcagggaattccttttgttctgaamatcttactgatcacttgaaatgtcttcatgcatgcctttccaagactcttgggtccctatactcattttgctctactttgatgtgtcaatccatctttgg

SEQ ID NO: 632 - DNA, 201 bp, Homo sapiens
gattttatttaaatcttcaaatttgtggatagtttgataatttctgaatcctatactaggcctgtgggctcaggatgtaaactaatgccaatagtccctayccctgagaaaaacataattaggtcagttaaacccactgaaaaaagtccatgcaagctgttcaattatttgtttagcctgaataattaaagcttgacctct

SEQ ID NO: 633 - DNA, 201 bp, Homo sapiens
gagtaggtatgtcagagaaagcttaactgggccctgaatttgagcataaagctcttatttatcctggtttttattgatccttatcccagtcctctcttctytggagttctgcacaggttgccttcatacacatctaatatcagatgacctaggttaaatcatctccaaaagttttcacagtctgattccatcccacaaggc

SEQ ID NO: 634 - DNA, 201 bp, Homo sapiens
tattgatccttatcccagtcctctcttctctggagttctgcacaggttgccttcatacacatctaatatcagatgacctaggttaaatcatctccaaaagytttcacagtctgattccatcccacaaggctactcatctaattgtctttttctttactactcagggtgtaatctgttaggcttaataggctcatagtgtct

SEQ ID NO: 635 - DNA, 201 bp, Homo sapiens
tgaaatggaggagttgtttctctttttaattgacagataaaattgtatgcatatactgtgtatgacatattgttttgaagtatatatacattgcagaatgwcagataaaggagtcttgactttgcagttcttttcataaagaaagagcagaacatagctaatacttgttcaagaaaatttcaaataaatgccatcttctgt

SEQ ID NO: 636 - DNA, 201 bp, Homo sapiens
ggttaattagcttgatttagccaattcacaatttataaatatattaaaacatcatgtttacaccataaatgtgtataaaacaacaacaacaaaaaaactgkggtacacccatataatggaatacatgcaataaccagatgaatctccagagaattatactgagtgaaaaaataccagtccccaaaggttacatgttgcctg

SEQ ID NO: 637 - DNA, 201 bp, Homo sapiens
atttcatagctacctttctcagaagccaaatgccatctcccaaccaaaatcttagatgagttactttgttttaagagtaacagatcactaggagggtcctyccagggcctcattctggaaggagaaccagtgtcttggctaggaaggtcctcccagggcctcattccggaaggagaaccagtgtcttggcttaggtgtctc

SEQ ID NO: 638 - DNA, 201 bp, Homo sapiens
aactcagaattttcaaatgagagattattctcctaaattagccaaaggagaaatctcaggaaaaagataaagccttccatttacattgatttagtcattcrtcaaatgtatagtaaatattttgtgctccattctctgcctttaaagatattctaataattccacttggaggaaaagcataatataagaaattcatctttt

SEQ ID NO: 639 - DNA, 201 bp, Homo sapiens
ttctttaacttggtgtctgaggggtttttgtctgtggcttgtcctgctacaatttgacctagcaattctattactgggtatatagccaaaaaagaaaatamattgttcagccgggcgcaatggctcatgcctgtaatcccagcactttgggaagctgaggcaggcagattgcccgaggtcaggagtttgagaccagcctgg

SEQ ID NO: 640 - DNA, 201 bp, Homo sapiens
agctcctgcacagcaaaagaaactatcaagagagtaaacagacaacattcagaatgggagaaaatttttgcaaactatgcatctggcaaaggtctaatatsgagcatttataaggaacttaaatttacaagaaaaaaacaaacagccccattaaaaagtaggccaaggacaggaacagacacttttcaaaagaagacacac

SEQ ID NO: 641 - DNA, 201 bp, Homo sapiens
gttctaatttgatttctctgtggtctgagagattgttatgaatttcgttgataaaattttatatatttatggtatacataacattttgatatatgtacacrttacaggatgattaaatcaagctaagtaacaaatccataatctcacataaattttttttggttgctcttttaacactaagttttggggtggtttatttca

SEQ ID NO: 642 - DNA, 201 bp, Homo sapiens
atatgtattttaaaagcaaattaactgaattagaatgattatatgagaaaacttttaagtctataacatcctctagtgacatctgggtggtatcttagtgwgtcttcatatcaaggttgtaccagtgatgcagagtataaccagctagaggttttcacaggcataaaagaggtagagacattttagttatggagagaacag

SEQ ID NO: 643 - DNA, 201 bp, Homo sapiens
agactgaaaaagcccaaataaaatctgctttctctaaccaaagtaccagtaaagggcagcatagcgagatatgatagaaaactggtggacactgacttctstcctttagtcaaacaccacagaaaaacctgaggcccctccccaacccacaacagcaaaggctgaatggggagcctagacttctatgctcctgaggctaaa

SEQ ID NO: 644 - DNA, 201 bp, Homo sapiens
ggcccagatggtttcactagtgattcctaccaaatatttaaagaattattaccaattgcagacattttctcctagaatgtagaaaagagcatgcttaccarttttatgaaagctagtataactgtggtatcaaaaacagaaaaagacaattaaaaaaataaaactatataccaatatcctctcatgaacatagacgacaaa

SEQ ID NO: 645 - DNA, 201 bp, Homo sapiens
accttccaacattctcttttgctcttaacggaatggaaatcttagaaatgttgatgggacaatgacatgaatcatgaaaagaaaggaatagtgggaatacraatattagaaagccaatgttttgtggatgtttgaaactctcatatacattcatagggcttaccccactggtatgggcaacaggtaactctggtagtttct

SEQ ID NO: 646 - DNA, 201 bp, Homo sapiens
attccaaattagagcccttccttggagagttgtgatgtgtctatataatccaggcactttcttcacagagatgctgtcggcactctgattggcagaaccaytcttggtctagatcacactgagagtttacctgagtagaacctctgtttcacaaaggttttcctaggagcctaagtcactgaaaagaactaaaaattctac

SEQ ID NO: 647 - DNA, 201 bp, Homo sapiens
tgagtacctacacagggtatgaaagaaaatataaagaagaattgtggtttcaggaagttgggaagccaattcagatttcaaaaacactcattgaacaccayatatatggcagtgatgttgccagatactgtcatgacattgaagtttgagtgacctgaggactttggaagagtcaggcctagtttgaatctcaggtaggtc

SEQ ID NO: 648 - DNA, 201 bp, Homo sapiens
aaagacatgaaaacacaataatccattgtggcaggtaatttctaataaactttcgtcaggaatattcaagtatgggctgtggaccactgcttgtctgtgamctattgattactgggtcaaaataacacaaggagagaaaaatgagaatgaaatatttagtaaacttttgtttttctaaagcaatttgacattgctgtgact

SEQ ID NO: 649 - DNA, 201 bp, Homo sapiens
gtggcaggtaatttctaataaactttcgtcaggaatattcaagtatgggctgtggaccactgcttgtctgtgacctattgattactgggtcaaaataacayaaggagagaaaaatgagaatgaaatatttagtaaacttttgtttttctaaagcaatttgacattgctgtgactctaagcacatgaccagtgcgttcatct

SEQ ID NO: 650 - DNA, 201 bp, Homo sapiens
agtcctagttaggctctttaatctgcaaaagagaaccttaatcctatcttctatttggttgattgtcaaagcctttggatcatcctttgtctgtagattawctacactctaggattttgtcaaagattgcaacctttaattctctgctgtccaattcttatctatcttggtgaagtgacatgacatttaaggagaattgtc

SEQ ID NO: 651 - DNA, 201 bp, Homo sapiens
ctctctagatgtattagtgagttactggcatgtgaaaaaccaataagaaccctctttttttccctgctcttaatcaaaccagtccatttggacttctgtgyctgcatctgaggcagattcacacaacgtcacccaaagtgctgtcgaggggctgccttcactaactcctcaggcagcatgtgttaggttggtgcaaactat

SEQ ID NO: 652 - DNA, 201 bp, Homo sapiens
atgacaatgatatttatcctcctatgagggcaacctggtgtagtgagaaataaaacaaaccaaaacagacaaccaggagtttgtctgagaccaggcacctkaagaactaagatttagaagacttaaagaggtggtacatgtcactgcatatttgtcaaatgcaaaatactgttattctcattatagcacagtcttcagatt

SEQ ID NO: 653 - DNA, 201 bp, Homo sapiens
tttcactataatttggcttttctgtaatgtcatatcaatggaatcatcattacacacccttttgtgttggattagtgttagctggtatggtatataatttyctatcctttattttttacctatctttgtctctctcattaaagtggatttcttaaattctgcatacagtttagcattgcttttttattcaatcttatttgt

SEQ ID NO: 654 - DNA, 201 bp, Homo sapiens
aataatgtttagaattttatctgttggtttctcttaagtcatgattctaccgtgagtcatttaacttctttccaaagcacccagttgtaacaaacagtggwttatgtcactggagacgtactatgtagtcaaacttgtaatttcatctaagtgagatcagagagagaaataaaaagtgggtatcttttttatttcaaaata

SEQ ID NO: 655 - DNA, 201 bp, Homo sapiens
gtcatttaacttctttccaaagcacccagttgtaacaaacagtggtttatgtcactggagacgtactatgtagtcaaacttgtaatttcatctaagtgagwtcagagagagaaataaaaagtgggtatcttttttatttcaaaataacaggggttttaatatttctacacagcattagataatagcccaaacatattattg

SEQ ID NO: 656 - DNA, 201 bp, Homo sapiens
taaagtactgacattatctactaatgaaatgagagtgataggtagtggagatgtgaagatgaaagaagcttgattcttgttcataagaagcttttaagctmctgctgaaacagacatgcacatgggcatccacactacaaatctggagacaacaggtgctatatacaaagtctaagtgggttcagatgacaatgccctgga

SEQ ID NO: 657 - DNA, 201 bp, Homo sapiens
tctttgataccttcttgctttggggaacaggctttatttcatccagcttgggaagaaaacatttggtgactctcaagactctgtacaagtatccatttccyccagtctcaatagaagagtatatagatacgttagctcagttggtaaaagcatcatgccccaagtttaatgctgtcatcttatttgtatatgaaagggggc

SEQ ID NO: 658 - DNA, 201 bp, Homo sapiens
ttatttttattaacattgtgaatttacattgttgtttgttgcattcttgttaactagtattgagttttattcacagttaagatacttgaaatcaaatcttrttttttattctgttgcctcctcagcagcctgtagtctaattttatccacccactgtttctaaatccttctgacaattctatccagtgctcatttattagg

SEQ ID NO: 659 - DNA, 201 bp, Homo sapiens
caagcaagtcctccttcccctgcccttctcttttcagcttgggccacatctcattttgaatctgcttctcatctctagaccatgatccccttcccctgccyggtagattttttaggacactgtctttgaagtcatcttctcagctaggttcagtggctcaaacctgtaaccccagcactttgggaggctgaagcaggtgga

SEQ ID NO: 660 - DNA, 201 bp, Homo sapiens
attagagaaatgcaaatcaaaaccacaatgagataccatctcataccagttagaactgtgattattaaaaagtcaggaaacagatgctggcaaggccgtgragaaataggaatgcttttacactgtgggtaggggtgtaaattaattccaccattgtggaagacagtgtggtgattcctcaaggatatagaatcagaaata

SEQ ID NO: 661 - DNA, 201 bp, Homo sapiens
agaggcaccctacaccctcactggggttgtgtcagaaaaggccatgtagggatttagggctttcatctccagcccctaatgaagctcctgcccctgcagtrtcagtggaggccaaatggggaacttcccttcccacccagccaccaaggaacaatcccttcttaggtggcaatggagtggggaacctggactttgaccccc

SEQ ID NO: 662 - DNA, 201 bp, Homo sapiens
ggaacctggactttgacccccacttggcagtaaacaggctgtgccctaccccttttcctgacagagcaatgtcagaaaaagccaactttttaaaacagaarattggagcaggtatcggtaatactgaaaacagaaaaacaatagagaaaaatcaataaaacaaggctggttctgtgaaaagattttttttttttttttttt

SEQ ID NO: 663 - DNA, 201 bp, Homo sapiens
tgacctattgattactgggtcaaaataacacaaggagagaaaaatgagaatgaaatatttagtaaacttttgtttttctaaagcaatttgacattgctgtractctaagcacatgaccagtgcgttcatctcgcttaacagaataaaaaacaaaagtgttgcttagtggagattagaggggaaaaaaggtctttcagcaca

SEQ ID NO: 664 - DNA, 201 bp, Homo sapiens
gcttatgatagaatcttgtgcaagaacataacaattttgtaaaaatgcagttgttacaccttgcagaatacacaatcttgagctcattgtcacagagtagmtaacaaaatcatgccttagagaaacagtatttatgatatgagcctttgcctgaaggaaaatgatttttagaggctgtaaaatctacctttggcttaagcc

SEQ ID NO: 665 - DNA, 201 bp, Homo sapiens
ttttaaaacgaacctaggaaaaggaatgatccacaaatgtacttaagcttaacaaaaatctaaaccacaaaaatgtcagcattataagtcaaaatggctgrttataaaatcggagctaagatataaggtacaaaataacttatgtatattatttcatttaattttcataaccatcctgtgagatatggcccaagtagtttt

SEQ ID NO: 666 - DNA, 201 bp, Homo sapiens
tggtaaaggacttaaatgccatatgagaagtcttcacaccccagcagtcagacccatgaagctcctcccagcccttctataacttctagtgattaaagacyccctaattgtctgttccttattttattctacaaagccagcatcaccctaataacaaaacctggcaaagacacaatgaataatgaaaactaccggccaata

SEQ ID NO: 667 - DNA, 201 bp, Homo sapiens
gtcacctggctgaggtctggggaaagggacatctgaccaaagtttggggaaagatctgtctcaccaaggtctggagaaagtgtcatctggtcgaggtctgrggtaaggggaatttgactgagatctgcaaagaggggcatctcactgaggtctggggaaaggtttgtctgactgagttctggagagaggtttgtctggctg

SEQ ID NO: 668 - DNA, 201 bp, Homo sapiens
tgagaaatatcaggttactaatttttcttctatttttctagtgccatttccatgtggaagagtttctgtttcacaaacttctaagctcacccgtgctgagrctgtttttcctgatgtggactatgtaaattctactgaagctgaaaccattttggataacatcactcaaagcacccaatcatttaatgacttcactcgggt

SEQ ID NO: 669 - DNA, 201 bp, Homo sapiens
agattatttctttttccgacgtttcagtaattggagcagtaaaccccagtgtcccttacctacttgtttattacctccagatgcaatattactggtactgwgattgagaaacgcacacagtgctaatgaggaattcactttctactctgacactctggaagaatagagatgcaatcctaaggaagaatttaacaccacagg

SEQ ID NO: 670 - DNA, 201 bp, Homo sapiens
cttagaacctaatgaaagtttgcattcctcagtaaaatcagagactgctgattgacttaaatgtttatagcttcaaagtcctcctcattatcatggcccasaagcccttccatgattgtccttccccaccctccccattacccttcttgcctcctctgctacttctctcctcgcacactgggctccagccaccctggcctt

SEQ ID NO: 671 - DNA, 201 bp, Homo sapiens
catataatgggaattctccacatgtacaaaccacttcatatgctaaacttgttgacaacattcaaagctcatccctgaatttgactatattgattacatcraaaatgttacatagcaaccttagaatccttgtgtaccttttcttctcaaagcctagattatttctttttccgacgtttcagtaattggagcagtaaaccc

SEQ ID NO: 672 - DNA, 201 bp, Homo sapiens
ctagaaggccttttagtctgcaaaagaaaccttcttaatcataagcagcagaagtcccatttaccaaattggaaagttaaagttacaaagcatcaatcatmagacttccattcagggatggcaattgggagtaagactttttagtaaagaaactaaacacaaagtcattagactctgtaaaagtcttaccaaatttgattc

SEQ ID NO: 673 - DNA, 201 bp, Homo sapiens
gccagagatcagagcaggctaagggactgctgggatcctgtccagctttgagaccctacagagccatgttcacctagcacgtatcccgtctgcggtcacgstcatttcttaccttattccagggctttcacctcagcttgccaggctggagccaagggccaacgcagccgcgccttgttcgcgatggtagcttcccaggag

SEQ ID NO: 674 - DNA, 201 bp, Homo sapiens
tacagaaaatgtccagggaaatggtctatttcttattctatttttgacctaaagaaaatctttaaaatgtcttagcattttccccagtctccatccacttycctcagctttggcctgaagctatctttaaaggtaccctgtacagctcttgccctgtacagctagctacagagattcaatcctttctgttcgattaggaca

SEQ ID NO: 675 - DNA, 201 bp, Homo sapiens
gccacagtaggccagtgacaagggaagattgacacatcatcccctgctggggcccagtgtcctgtggctggcaggcaggggatcctaaggacatgtgggtsttaaattgtagggtgcacttcctgggcacctttgagggtctgcactgccccagcaaatatccccatgctagaaggagcaaaatattaaatggcaaatttt

SEQ ID NO: 676 - DNA, 201 bp, Homo sapiens
atggttaagagagagtggaaagaatgaatgagccctgctattcctcactgcctggatggctataagcacagcccttatggaggccttaggtcttgcttcayaatattccagtttgaaaagggtttgaaaagacctcctagaaaaatcagtagtttttctcttttgagtaacatgtagcaaaaaaaatttcatcatgtaggt

SEQ ID NO: 677 - DNA, 201 bp, Homo sapiens
aaagggtttgaaaagacctcctagaaaaatcagtagtttttctcttttgagtaacatgtagcaaaaaaaatttcatcatgtaggtacagggaacaccctartaactattaatctcaaggagtcaagccagtgtgtttcctaatgtatctgctgtatccccatgaagcaaattttgccatcagagaaactgactcatgggga

SEQ ID NO: 678 - DNA, 201 bp, Homo sapiens
gctagacagtagttgctcaataattgttagctgaatcagaatccatgtttatcccagagtagcaattagtcttgcatcgagtatcgtgaaagaaggccacrcttaaataagaataatgcctggggtttaggttttatgaaaaaatgaaaggaaattagttctgcttttgttgactaaaggaagggaagagagaagagacta

SEQ ID NO: 679 - DNA, 201 bp, Homo sapiens
taaagtgaacagctgcaatgaaaataagggaagaaagtttagttcatctccgtttctttcctttcctttttactttcctttctcttcctttttggagttartcaggaagtagtcccaaataccccagaaagttcatcttataagcccttggtcctcttgagatggtatcagatatattgctagacccttgaagaaaggaac

SEQ ID NO: 680 - DNA, 201 bp, Homo sapiens
aattagagggtcactgatggtcgagaggaaaaggagaaagacagttggcaaactatttatttttgactctaacatgagactttataagtttcccatgtcaraactctttacaaggtcatcactttggtcaatttcaaattgatttgttattaaacatgtgctgcctatactgttccaacatgtaattctttctccttctgc

SEQ ID NO: 681 - DNA, 201 bp, Homo sapiens; identical to SEQ ID NO: 187

SEQ ID NO: 682 - DNA, 201 bp, Homo sapiens
acagtggtctgaatccacctgagacagaattgggtctaactaactgtgagtatggccttcaataagtcactctccatttgggaatttgatttctccacttstataatgagagtatttgacaggatgctctcccaaatcccttgcaattttgttagtctgtgatttcatgtttttatttttattccttcatccaacaaatag

SEQ ID NO: 683 - DNA, 201 bp, Homo sapiens
caggatgctctcccaaatcccttgcaattttgttagtctgtgatttcatgtttttatttttattccttcatccaacaaatagtcaaggagtaattgctgtstgccaaataccaacagtattcattaaattgtaattcagattttatatatatataaataatgtataatgtgtataaattgctttgtgagtgcctactacac

SEQ ID NO: 684 - DNA, 201 bp, Homo sapiens
agaactatttcaaactcctggccaggtcattccactctaataggagagctatccttctattctcttggttaagagaaagctggaaatagaaacagggataytccaggccagacacaatggctcacgcctgtaatcccaacactttgggaggccgaggcaggcagatcacttgaggtcaggagttcaagattagtctggcca

SEQ ID NO: 685 - DNA, 201 bp, Homo sapiens
gacctcataaagataaagagttcccatgatttacacattacgtgctttcataaatatctatatataaaagcctattttcctcttggactatattacaaaartaagtatgcattttcataagattcaaacccagctctaaatgtaagaagccaaattaagaatgtagcaatgtatgaatgaaaaggaaggaaaaaagccatt

SEQ ID NO: 686 - DNA, 201 bp, Homo sapiens
atacttgattcaaacctatttctgtctgatctgattctaaagtctgttttttcactcaaccacactgtacagtcagctctccttgtgagttccacagccamagattcaattaactgcagatcaaaaatattcaagaaaaaaatggatggttgcatctctactgaacatgtacagactcttttatctttcattattccctaa

SEQ ID NO: 687 - DNA, 201 bp, Homo sapiens
tctccttgtgagttccacagccacagattcaattaactgcagatcaaaaatattcaagaaaaaaatggatggttgcatctctactgaacatgtacagactyttttatctttcattattccctaaacaatacagcataacaactatttacatagcatttacattgtattagctattaagagaaacctagagatgatttaaag

SEQ ID NO: 688 - DNA, 201 bp, Homo sapiens
actgaacatgtacagactcttttatctttcattattccctaaacaatacagcataacaactatttacatagcatttacattgtattagctattaagagaawcctagagatgatttaaagtacaaaggaggatgtgtttaggttatatgcaaatagtaagccatttttatatcggagacttgagcatccacagatcttgata

SEQ ID NO: 689 - DNA, 201 bp, Homo sapiens
tcatagagggtaaaagtcaaagagcagagaaccaaaaattgggctaaatcttcaattcacaatacacatggccttaaacttctgcttcagaagagatttgyacatcaaggttggctcttcacactagcagagatacggaatcagcctccaaattgtcactgctgacatgacatttaatggtggggaaaaacccaagtgtcc

SEQ ID NO: 690 - DNA, 201 bp, Homo sapiens
catagagtgaacagactcttaagaaacaaaagttgttctcatttactctcaccgccaggcacacacttaagggttcttcaattacctcactggtctctctyttaagtgacctctgctagctcttccttatctccttgaactttaagtgttagagggcaccagggccttgtttttggacattttcccttctctatgctcact

SEQ ID NO: 691 - DNA, 201 bp, Homo sapiens
tttcccttctctatgctcactcccttggtgatctcatctgtgtcattgctttaatttccatctacatagacacaacttctaaatgtttgtgcgtgtgtggraagggggatgtgatcttttgaggcccagatatatgcatcaaactgcctcctcaatatctccttttggatatcaataggtgcctcaaatttaacatatcca

SEQ ID NO: 692 - DNA, 201 bp, Homo sapiens
agaaacactctaactgccctcttaccagcaagagacagggctccactctgtgcagaactttcacaagctgcccctactacaacacgcaacgtgctcagtgwtcataacttcccaccctcactcactctgtacctttttcctcactctgatttctttcatccactgaccatcaaccatttcatctctaaatcactcccttag

SEQ ID NO: 693 - DNA, 201 bp, Homo sapiens
aggcttgagtagcagggcactaaagaagcaagccactccccctgtcaaccaccctgcgagagggacaagggagctttttccttttcacctctctctgtttytcatcccacttcttgcattatcccagtggtagtttcttttaagatcaatctccactattgccctaaattaatgttccctccataagtcttctttatcagt

SEQ ID NO: 694 - DNA, 201 bp, Homo sapiens
ggatggctgagccaaatctgggaggataagtctaacaccatttcttcgtaatagctcagttgttccaataccattttcttctcaacctccaaaatacaggktactttatttatttcagtattctttgtgcatttaaccaccattctcattccacaggctttggtgaattaaagtaactacagttaccaactctttttattg

SEQ ID NO: 695 - DNA, 201 bp, Homo sapiens
ccaataccattttcttctcaacctccaaaatacaggttactttatttatttcagtattctttgtgcatttaaccaccattctcattccacaggctttggtraattaaagtaactacagttaccaactctttttattgaaaaactctttatgagttgattgtaactgcttctccaattataattgcttcctctccacaggcc

SEQ ID NO: 696 - DNA, 201 bp, Homo sapiens
atgttgtgtaaactgtggaaactattgaaagaatcacagcaggcaaaggactgtgggacccctgctcttttcaatcaatccaggcccacaaatcactctastcattttttcctacggtagtttcgaggcaaatctttttcatccagtctttggggctatggactgccttgagatttctgagtcaatctcaacttctaatat

SEQ ID NO: 697 - DNA, 201 bp, Homo sapiens
tggaaactattgaaagaatcacagcaggcaaaggactgtgggacccctgctcttttcaatcaatccaggcccacaaatcactctagtcattttttcctacrgtagtttcgaggcaaatctttttcatccagtctttggggctatggactgccttgagatttctgagtcaatctcaacttctaatataggtatcaaaagtga

SEQ ID NO: 698 - DNA, 201 bp, Homo sapiens
caatggcctcaggatgaggagtggcaatgacacacagcacctaaagatcactggtccatcaacaaaaggaaggaaatgaggctggcatggtaggcagtgtmaggttaccaacaagcctcttccactaagcaaatagaaacaacaaaatatctgcaaattctctacctgtgatgtttgggaaatatcttcagtgacctggga

SEQ ID NO: 699 - DNA, 201 bp, Homo sapiens
gaacatgcaatgttagtcttcctgtgcctggcttatttcccttaacataatgatcacctcttgccagcatttgaggtagggagagtgtaggcacttatggraacctattgcagtaggatctaccctagttttattttacatttccaactgccttttggcagtatctccattcaaatgtttaaccaccattgtaaacccaac

SEQ ID NO: 700 - DNA, 201 bp, Homo sapiens
ctagttctgtgagtgatcctatgtatctagtcacccaggcttacaaatttgctgtcacgtttgtttcctctctaccttatttccaacattcagtgagttayctagtatgatggttaattttaggtgtcatctggattaaggaatacccagataactggtaaagtgtgtctgtgagggtgtttccaaaggagactgactcat

SEQ ID NO: 701 - DNA, 201 bp, Homo sapiens
ctatatctgatctatatcatctatatctacatcctatctgttctatcttcatgaaaaaccctgacaccaagtcagaaccaatttagctctccaatatgtcrctcagtcctgtcgcctctgttctctttccactgccaccagagtaagtcaggctcacatcatctctacctagaccagtgcagtggcctaactacctttcgc

SEQ ID NO: 702 - DNA, 201 bp, Homo sapiens
tattagatttgggtggggacacacatccaaactatatcactgaggaagcccattcttgtgaacgtccagcttacgttttgaaactacaagagaagtagacmgttccaatgtacttatatttgtgatttccaggtttactgccacataattttggcccataaagtgaatactctttctgatttgggattgtgcattcataaa

SEQ ID NO: 703 - DNA, 201 bp, Homo sapiens
acgtaagaggtgttcaatgttagactacttccttctctccctgtaagttagtacaaaaagggcaaatgaatgagtttatatgttaccttatcatgctttamatctaaacatttcaccaaaattcataggaagaaatatagtaaagaaataaactgaaaaatcaagccatcttggaagaaagctgaaaggatatttttatct

SEQ ID NO: 704 - DNA, 201 bp, Homo sapiens
ggatctgataattaaattggaattatggcccagaaaattaggccaggacctgtgtgttaaccctaaaaagggttactgcccgctaaataggatccagagtytgctaacacactttacaaaatgtccagaatacacataacaaccacctttcatatcaagacgcaggaaaatcacaattgtaataaacagagatagtcaagg

SEQ ID NO: 705 - DNA, 201 bp, Homo sapiens
taaggtcacattcataggttctgggggttaggatgtaaacatatattttgggggccaccattcaacccattacatagtgtttatgtgggggagagatatcytccctttttgtcttcctgattgtaatgttaatatacgttcatcataaaaatatagtgaatatagaaaatcacaaagaaacttaaaactcatctttaattt

SEQ ID NO: 706 - DNA, 201 bp, Homo sapiens
tgaaagttttactgttgtcaaacacgtacacaaggggaaaggtgtcttacattgtttatgttcctgtgctgctctagaaacagaaataggctcaagagcaragcctgtttttcttaattcagcaggtctaagctaacaagtcctgaaacatggtacttcctgttattggtattgcataggagaaacaaagggaaagcacag

SEQ ID NO: 707 - DNA, 201 bp, Homo sapiens
tgaaaaatggccaaacataaatcttttaccctcaatttatgtcatagcaatcgataaccagggtggctggctgacttgtaattggctgtattctacccaawatgtctcttgattctagaatgcagggttacagcaactacttttacaagaccctgagatacatattgaaaaccagctacctatataacactagtttctaat

SEQ ID NO: 708 - DNA, 201 bp, Homo sapiens
aaggacttatagatactgtgtcacttattcattcattcatttattcataaataacttattaaatgttagacaacccaaaataagcaaagcagaaaacgttyctacattcgcgtagcttaaaattgagtgtgagagacagctatttaaacattatcatactacttctgcttccaagtagaatgtaataagtcacagtaaata

SEQ ID NO: 709 - DNA, 201 bp, Homo sapiens
gacacttctgctgtaataattacttaaatatgaataaattataaaaatggtatttagatgcctgagagagctttgataacaattaggactagatgaattawatttccatagagtagacaaccattccaagccctgcaccacaaaaaaatataaaaggaatccttgagacagaaaaaaaaagataccagacaggaaaatgga

SEQ ID NO: 710 - DNA, 201 bp, Homo sapiens
ctgcttccctgtgggttccggcttctgcagagctgtaagagttgaatgccacacacagtcacactaaggaatgctccaggattgggaaagaaaattcaacmttataatgagaacactgtgaatgctattgaattaactactcccctctctccctatttcttgtaagtcttagtgtcagtaaactaattataaatttacatt

SEQ ID NO: 711 - DNA, 201 bp, Homo sapiens
agggatgaaggattgaaggttagaacaattaagcaacttgtgcaggatcaaagtgagttggatgaggagttagcggtgagggtgaggcttgtctctctctygccctctcatcctggcacatgtgcgatatcgtgctgaacctgagggaggaaaatacacgacaacaaggcaaaaaatgaatatagtaaacaaagaaaacac

SEQ ID NO: 712 - DNA, 201 bp, Homo sapiens
tatttaacattcctctcaagcaaatacgccttgaaatgctttttttaaatcataggaatttaaaaacactttacaatagagaatgattgatttttaaaatrtgtctgatttagctttgtagagatgttccgctaatatccataactaatctgagaggaaatgtggaacaacagaagagtaacagtgtctactcagtaacaa

SEQ ID NO: 713 - DNA, 201 bp, Homo sapiens
agggtttggataaagagacgcaattaggaaaggaaaaagcagaaggctcgttccagacctggatgagatcctaaaaagcagcagcttttgccagtaaagayccttgaaatgattcaattaccctcaaagcactccttgtctccaagacaatcactcataagcacaattccattgaagccaacgtaccattttgtgattttc

SEQ ID NO: 714 - DNA, 201 bp, Homo sapiens; identical to SEQ ID NO: 206

SEQ ID NO: 715 - DNA, 201 bp, Homo sapiens
cattggattccttacttaggtcactttcagcgttggccaaacaaaaaggctccagctgggggtatatatattccagggaagttaagttggccaaactttcmgtttgctacttcagtatcctccgagttgtttccagacacagttttgtgtgctttttagttttggttttcttttttaatcaatctgcagcacactcatgtt

SEQ ID NO: 716 - DNA, 201 bp, Homo sapiens
ttagagcctttctgtttctctcaatagggttggagagttatccttatcttctttttattggggcttaagaagagagatgaggttccatggagtaaacaatwcaaggatataaggacctcatataatctcacgtatccattttccatgaaagccattcttggcacgaatttgccattctatgtttgagcctcataaaaggca

SEQ ID NO: 717 - DNA, 201 bp, Homo sapiens
aaaagttgtcctccagacaactcagccaagggaggccctgtgtgccttgcctatcacatgagcctcactttccactgagtgaggctgtcatttcagaagcrccgggtctgtcacatgaaaatatatctgttaccatcacttactaaacaaatttagtagaatttgtttggtgcttattatgtatcaggcattgttctgaag

SEQ ID NO: 718 - DNA, 201 bp, Homo sapiens
aaaggaagatgtaggaagctgctcatcacaatgcttctgttgcagagtgtaccaccaaaatcaagcccaggatcgttggaggaactgcgtctgttcgtggygagtggccgtggcaggtgaccctgcacacaacctcacccactcagagacacctgtgtggaggctccatcattggaaaccagtggatattaacagccgctc

SEQ ID NO: 719 - DNA, 201 bp, Homo sapiens
cgagtggtcgatgaaaaacagaatcgtgatttactaaaaagcttttgccatcaactttatgccagaatttattttgaacccctaaaagacatttctataawagtactcctagttttcttcatgaaaaatacacttaaagcctaatttggatgcatttcatttatggtaaggagtctatcttttaataacactgtcagaaaa

SEQ ID NO: 720 - DNA, 201 bp, Homo sapiens
tacacgacaacaaggcaaaaaatgaatatagtaaacaaagaaaacacagataatgtacagtggaagaagagtctcttctggaaaagaggatatattttgcktctcatatttaaaccacgattttttaaatttagattctcaacgacccatatgcctgccttccaaaggagatagaaatgtaatatacactgattgctgggt

SEQ ID NO: 721 - DNA, 201 bp, Homo sapiens
gggggaaaagatgcttgtaaggtaactcatgagattatgaaaaacacaataggctgcttgagaaaattcatttcaaaatatattttccaatagcataattyaatcatagtttttaaaaaaattcagagacaaatgatctgataaattgataagcaacttttaacaaattgaatatacataatatatatttatattatttat

SEQ ID NO: 722 - DNA, 201 bp, Homo sapiens
aggatctgaacacagagagcggcggggccggcggggaaggagggaggaggggagagcgctgcttccctgtgggttccggcttctgcagagctgtaagagtkgaatgccacacacagtcacactaaggaatgctccaggattgggaaagaaaattcaacattataatgagaacactgtgaatgctattgaattaactactcc

SEQ ID NO: 723 - DNA, 201 bp, Homo sapiens
aacccatctctacaaaaaaatatgaaagtatctgtgtgtgtgtgttgctgtgtagtggactacagaactttagaggcagtcacttatttgaatcccattgycgtaactttctactattttatttttccactgtgactcagggagattcaggtggtcccttagtttgcaaacacaatggaatgtggcgtttggtgggcatca

SEQ ID NO: 724 - DNA, 201 bp, Homo sapiens
cgtaggcaataagaggacagtacagggtgccgtctctctccctcttcctctctctgtctctctctctctgtgtgtgtgtgtgtgtgtgtgtgtaacactaycttcccaatttttactgtctatttgtattcaaagataaggtccttatgaaaaatacactgctctgattcactttaaaacttatttccatatttattattt

SEQ ID NO: 725 - DNA, 201 bp, Homo sapiens
ctcacaggtgaaatccaaaatattctacaaaaggtaaatattcctttggtaacaaatgaagaatgccagaaaagatatcaagattataaaataacccaacrgatggtctgtgctggctataaagaagggggaaaagatgcttgtaaggtaactcatgagattatgaaaaacacaataggctgcttgagaaaattcatttca

SEQ ID NO: 726 - DNA, 201 bp, Homo sapiens
ttgtaaggtaactcatgagattatgaaaaacacaataggctgcttgagaaaattcatttcaaaatatattttccaatagcataattcaatcatagtttttwaaaaaattcagagacaaatgatctgataaattgataagcaacttttaacaaattgaatatacataatatatatttatattatttatgatatatgtcacaa

SEQ ID NO: 727 - DNA, 201 bp, Homo sapiens
gcagtcacttatttgaatcccattgtcgtaactttctactattttatttttccactgtgactcagggagattcaggtggtcccttagtttgcaaacacaayggaatgtggcgtttggtgggcatcaccagctggggtgaaggctgtgcccgcagggagcaacctggtgtctacaccaaagtcgctgagtacatggactgga

SEQ ID NO: 728 - DNA, 201 bp, Homo sapiens
aatgtttttatgtgtttgatatgatatatttctacttcccttttgtttttgttagaaatctttgtctccttaaaacatctgagagtggattgcccagtacrcgcattaaaaagagcaaagctctttctggtttcagtctacaaagctgcaggcacagcatcccaggtaaactgagagttctgcattctggctgagagtgac

SEQ ID NO: 729 - DNA, 201 bp, Homo sapiens
actctcataaataatatataaaagtctagtgattcatgaatttgggaaacaaagctctatgcgggccagcttcccatctagccggagaccactgcctcatsagagttaggatggaatactgcctagcttggcagctggctctaaatgactgtgcgatgcgttagactccttacataattaaaaattatgtaaggagtctaa

SEQ ID NO: 730 - DNA, 201 bp, Homo sapiens
agcctctgtaacctaataactagacatggtatccttagaactctcataaataatatataaaagtctagtgattcatgaatttgggaaacaaagctctatgsgggccagcttcccatctagccggagaccactgcctcatcagagttaggatggaatactgcctagcttggcagctggctctaaatgactgtgcgatgcgtt

SEQ ID NO: 731 - DNA, 201 bp, Homo sapiens
aaagtatttatcttcacgaagatgatattctcactggggagagacagcaaataagcattgcagaacggcctgaagtttcagaatgggttgtaaccttagarcattgcctgctatccaaatctccttggaacaaatccacctagcaccaggaatcaatttaatcgtggctctagaattcacaacaaaatcgaataatacagt

SEQ ID NO: 732 - DNA, 201 bp, Homo sapiens
ccgagcaagattccatttcaaaatgatgatgatgatgataataataataataataataataataataataataataatgtatttgttggagtaaaactcayaattccattgcttttgcaagatagttctgtcagagtcacagttttattatagtcaggctagaagggagaaggccttctcatcattgacctgtagttattt

SEQ ID NO: 733 - DNA, 201 bp, Homo sapiens
gaagaagaaagagcaaaccagcctcacctgccatctgctttgttctgggctttgtgctgtgtgctctatttttgtatgcattgcccatttaactgtcccarctgctcagtgaggtgggatatgtatggatggtgttgggaaaaaagctcagtgttgggagagaagctgaggcagggcttgcatgtctgctacacttgctgg

SEQ ID NO: 734 - DNA, 201 bp, Homo sapiens
tggggacactcaccaatcctatcagattaggacctcaccctatgacctagtttaaccttaattacttccctaaaaacccagtctccaaacacaatcacacrgggggttagttagggcttcaccataagaattttgggatgacacagttcagtctataacaaagacctttattaaaagcaagatcttggatctttcttccca

SEQ ID NO: 735 - DNA, 201 bp, Homo sapiens
ctcacgcctgtaatcccagcactttcggaggccaaggcaggcagatcgcttgaggccaggagttcaagaccagcctggccaacatggtgaaaccctgcctytaccgaaaatacaaaaactagcctggtgtgtgttctgcgagggaaatgcttgaggggagaagaaaagacacacacacaatacctttaagggtaaacaacc

SEQ ID NO: 736 - DNA, 201 bp, Homo sapiens
ttttagtaaataataatcatcctggaaatgaaggtaaactgtaagttgctcaaaagagaattaaatattgctcaaattcaccacaggaccaagaaaactaratcaaaataaagaagttaagaagtataatagaaaaaataataggtatagaagataggcaaagaagatggaacatatatataactggaatctgcaaagaaa

SEQ ID NO: 737 - DNA, 201 bp, Homo sapiens
ttttaaaagttggaaatgttcttgaatagttttgatcctaaagcctcagagaaagtctgtctgtgacccgctccagagctgcctcactttctgacatgagyggtgctcttggacagccggcaacgaagccacgcttgtgaaggacacagcggttctcacctgtggcacccggggcaccagtggctggccactgccctacac

SEQ ID NO: 738 - DNA, 201 bp, Homo sapiens
cagagtagtgtgatcattaatctaattttctatcatcttcatcactcccccaaagaaacctcatacctatgtgtagatttgcctcttctgaacattttacrtaaatgcaatcatacaacatggggtgttttgtgacctgtttctttcactttcaccttgttttcaaggaggaaccatgttctaaagcctgtacttcattcc

SEQ ID NO: 739 - DNA, 201 bp, Homo sapiens
aacattagagaagactctcaatattgctcatgttagaataaagccagcttcttttctattaaaaaaatgcttgtccaactcgcgtgaggtttgtcagcgaygcagaggaggggcttttgttgttgcaggggtcatacttttccatttgtttttcctcgtggaattttctccagctctcccatttaacactgcgtgccccgc

SEQ ID NO: 740 - DNA, 201 bp, Homo sapiens
ggcacagcatttgtcattgcttctgcctgccccttaataaccatatccacctgcttgtgtcttttaactgagttatcagtcacctcctccatgaagctgtygcaagctttctcaggatgacgcccctcttgctgcattgttgcctggtctgtgcctctgtgtagaacttgccacattgcattatggccagaggcttgtgtg

SEQ ID NO: 741 - DNA, 201 bp, Homo sapiens
tttctgcaaatctaaaactgctctataaaataaagtctactaatttttaaaagtgtacaccgatttggaaataagtcctactacacaaaacgtgatgggtragcctgaactccgggtccagactgcttgagtgagctgggacaaatgacgtgtggaaaatagcaggaacagtgcctggccatagggctggtttgaaagggc

SEQ ID NO: 742 - DNA, 201 bp, Homo sapiens
gcctgaactccgggtccagactgcttgagtgagctgggacaaatgacgtgtggaaaatagcaggaacagtgcctggccatagggctggtttgaaagggcakatgaaaatctatggggagcagatggccaagtgcctccagatggttataacattagatagagttctcataagataatttctactagtaagaaccactcaca

SEQ ID NO: 743 - DNA, 201 bp, Homo sapiens
tgaatatataaagcaaaaaaatgaaaagtgagaacttccaggctttggattgttgtaggtgataaatataaaatgggatttctggggggctgctactgagwtgaggggatggcagaaaacatggaagcaaggtctctggtcagcccagggtgctgggcttgtcccaacaccacgtaggcaataagaggacagtacagggtg

SEQ ID NO: 744 - DNA, 201 bp, Homo sapiens
tccctctaattgcactgcttcctctggaactcagtatatctcaaagatgtaatttcctctccgtgctgcacctggtcggccactgaaacccactattgccygcttcacgtgtggcaaagagctagcgggcttgggttttgttctgccgagaggaagggagaacacccacttttataagaaagagatgggttacctgaaccc

SEQ ID NO: 745 - DNA, 201 bp, Homo sapiens
cttttatctcagtctttgagtattgatcatggggtgttggaacaggactttggaatgcttgcagggtaaacctttggcctctgttagtcagggaatgaccyagtttggcaaaacagaggagagttttgaaatatggaactttcccgaggcatacattgtcattttaaagtggtcaatcaaagcccagtaggactgggctgg

SEQ ID NO: 746 - DNA, 201 bp, Homo sapiens
tgatatccggttgcttctcactaggagaaggatgaaagatgacagagcatttataaccaccatttgttattttcattatcaactgacactggtgtttctcygcccggagcgattttgtcctcccttcacctcaggaaacattcggcaacgtctagagacacttttggttgtcctaatgggagagggtatgcaactggctgt

SEQ ID NO: 747 - DNA, 201 bp, Homo sapiens
gactcgtcagccagtgagtaggtctgggtagcagttggcatggatgaacatgccctccataggctttcagaccttcttcaaggccaaagggaaggccttcrtggaaatataattatgtgaaacaccccagaattttttcacaaactttcctgcctataaacgccaggtcctaccactgtccagtgtcccacttcccactgt

SEQ ID NO: 748 - DNA, 201 bp, Homo sapiens
taaaatttactattccagaacctagagcagggattggcaaatgtcttcttaataacgcagagtaaatatgttaggctttgtgggcaaaacccacagtaaarccaaggatattatttaagtatttatgtcaccacttaaaatgtaacaatttgaaaatataaaaatcattttgtatagctaacaggctaaacagaaacacac

SEQ ID NO: 749 - DNA, 201 bp, Homo sapiens
agatggaaatgtcaatgacagaatgtggaggatttcgcaagcagcagagtgtaggagaagcaatgcccttggctcatctagggcaaagggttgaattggcractggaaatagaagtcaaattcagaagagaggtttatgtggacatctgtgtttaggtgtcaccaatatacagctgatactttttaaaaatctagtgaaat

SEQ ID NO: 750 - DNA, 201 bp, Homo sapiens; identical to SEQ ID NO: 190

SEQ ID NO: 751 - DNA, 201 bp, Homo sapiens; identical to SEQ ID NO: 191

SEQ ID NO: 752 - DNA, 201 bp, Homo sapiens; identical to SEQ ID NO: 192

SEQ ID NO: 753 - DNA, 201 bp, Homo sapiens
tctgtccattatggaaggctggtgttcactgcagggattccacacttcatttaaccagagtccccgtggacggacacttgggttgttttcaatctttccckctttcatacacacgcaggaacatttgtaggataaagtccagatgtagaattgctgaagacaaaacaaaacgaaaacagcagatgcatttgtaattttgaa

SEQ ID NO: 754 - DNA, 201 bp, Homo sapiens
actccaccatgcccagctaattatttttttgtatttttagtagaaacggggtttcaccgtgttagccaggatggtcggcttccggtgttgtttcagcatayggctaaattaaaggcttagattctcagtttgctcattctaatttagctgaattctgagtattatgcatttgtatctgaggttccaggcctctccctcctc

SEQ ID NO: 755 - DNA, 201 bp, Homo sapiens
cataagctgttagaggtgaaagagacttcagcaatcattccatagaaatgaagctccaggcggggctgtgacctctccccgctcacacggcctgtgagggyggacgctgagcccaggaaatgtaggtctcctgtgcctcagtccttcaggggccaatttaaatgagaagggaagttggatggtagagttcatggaatagca

SEQ ID NO: 756 - DNA, 201 bp, Homo sapiens
ccgctcacacggcctgtgagggtggacgctgagcccaggaaatgtaggtctcctgtgcctcagtccttcaggggccaatttaaatgagaagggaagttggrtggtagagttcatggaatagcagttcctctgtcaggcctgtgtttctctttgctgccactaacatataagaaagaaacatgtttctgagatgccacagtt

SEQ ID NO: 757 - DNA, 201 bp, Homo sapiens
tgctgacagcaatggcaggctgccatccttggagtgaggacctgtgcttctacttcctgcttcctctgaaccccagcagctgccagcacagcgtctaggartagtggctgtggacataattaggagtttcttgagcagcctagttaacagccccacagagggcatgatcatataagaacgtcactcatgtcattatcattt

SEQ ID NO: 758 - DNA, 201 bp, Homo sapiens
tgagtaactaaattgagttgagactcttaactgatgttcagattcactgccagcactccccacacataccaggaaacaccctgtgttccagtgggcagacycatgcaagcccacccccaaagcctgggggtgcagagaggccgaggaaagaggctgacaaatccagactctcagaaaggagcgttgaatagggacttatcc

SEQ ID NO: 759 - DNA, 201 bp, Homo sapiens
tggctgagcttccaggctggagtttctcattcactggatctgaggttgggctgaagaatgtgcatttctaacacgttcccaggtgacgctgttggtctggrgactgcacttgacaaccactggtttaaaaacaccattcacgttatcatttgaaggagggtaagacagccttgtagtaccacacaaggagggctacattct

SEQ ID NO: 760 - DNA, 201 bp, Homo sapiens; identical to SEQ ID NO: 193

SEQ ID NO: 761 - DNA, 201 bp, Homo sapiens
atttctccccgtggctctggaggctgtaatgctggaatctcggtgttggcagaactcggctcccttcgaggccttaggaaggaccctgccttgcctcttcmtcgttcctcggctgcctccttctccacgtgggcctctcccacatttcttatccctttcttgtaagtaaactagtaatattggttaagaacccaaactgct

SEQ ID NO: 762 - DNA, 201 bp, Homo sapiens
ttgacgttctgaattggaatcttccctctaccatttactgactgggtcatcttgggcaacttactgacccattccgtgacgcagttcccataagacggggmtggtgatgacaatagttacctaagtcactgtgagggttaaacgagtcgtagaaagtacattttgaggagtgcttggcatattttaggtgtacaaagtatc

SEQ ID NO: 763 - DNA, 201 bp, Homo sapiens
tactaggaagactgacaatagagcaagctcagaaaatttttatggaggtgatttagttagaaaatttgtctgcaacctaagggccatggagtgtgactccrtggtttatgggtgtaactccgtggtttatgaagagtactttcaaaataggaaaatcttcacaactaagtgctagcatgagctgactttactttctctagg

SEQ ID NO: 764 - DNA, 201 bp, Homo sapiens
caagacggaaattagaacagaggttgccaggggccgaggggccaggggaagggctgagggttggtgtttaatgggcacagagcatcagctggcgaagttgraaagttctggaggtggatggtgctgatggttgcacagcaatgtaaatacccttagtgccacagaactgtacactcaagatggctacatggcacatggtat

SEQ ID NO: 765 - DNA, 201 bp, Homo sapiens
tgcatttctacatgaatttttggatcagctaggctacttctgcaataaaagacagctgagattttgataaagatccatttgtggagagtagccatcttaamaatattaagtctcctgatccatgaatgtagaatatctttccatttatttagatttttaatttgtttcatatctttagcatataaattttgtacttctttt

SEQ ID NO: 766 - DNA, 201 bp, Homo sapiens
tagactttgagattcaaggtcagctagaattaatggttaacagctgacaggtgaaagtgtggttaaatgcagctttggctagcaggcacacaggcaaaatsaagttctacatctgtccctgtgtatgtcacttgtttgaatacgaaataaaattaaaaaaataaattcagtgtattgagaaagcaagcaattctctcaagg

SEQ ID NO: 767 - DNA, 201 bp, Homo sapiens
caagtaattcacatttttagattttttattggtaatctgagacaagaagaaatttaaagtaatcttcactaagccatgaaagctcccaacattgttctccrtgagagatgctggcctgcatttattcaaaaacaaaagacccctctgttgccaaagctcggagggcttttcagaaacgatatagttgtaaattataatttt

SEQ ID NO: 768 - DNA, 201 bp, Homo sapiens
agcaacagagcaagaccctatctctaagtaaataaataaaatacagaacgagttcggtatgcatcctcacattggattccttacttaggtcactttcagcrttggccaaacaaaaaggctccagctgggggtatatatattccagggaagttaagttggccaaactttccgtttgctacttcagtatcctccgagttgttt

SEQ ID NO: 769 - DNA, 201 bp, Homo sapiens
ctgagatctccatgactgtgtgttgtgaaataaaatggtgaaagatcacgattagcaagtgttttcttctggttgtgaaacagaactgaaagtaagtggtygaggttccagcacagttcctgggatccctctaattgcactgcttcctctggaactcagtatatctcaaagatgtaatttcctctccgtgctgcacctggt

SEQ ID NO: 770 - DNA, 201 bp, Homo sapiens
caagagccaggctcttaggagctgtctgtactttgcttcccatccgtccgctctcccccagcagccaaagtctcctccctccattatattgcaaatcaatkaatccattagactttccatgttttctttttagactttgagattcaaggtcagctagaattaatggttaacagctgacaggtgaaagtgtggttaaatgca

SEQ ID NO: 771 - DNA, 201 bp, Homo sapiens
aacgctcaccccactcccatcctcccatctagtggcatattgaaaatcaatttgtcttgtaaaattaaataatccaattaggagggggatatattctaagraaattagtgcatgatgcacacacacacacacacacagaacacgtgtgtgcgcatgtgcacatgagagagagtgagagagaaactgggtcttgctctgtcg

SEQ ID NO: 772 - DNA, 201 bp, Homo sapiens
tgctaacaggccatggaccaggtactgttctgggccccgggggttgggaacccctgctcagagacacaccgggtggtaggaggagctaaaggtggagaggstgaaggaaaatatgaggtctgggctatccacaaaccagatagcaggaaactgaagagttaaacatttacttcagaattgaatggcttttgtaaaatctgg

SEQ ID NO: 773 - DNA, 201 bp, Homo sapiens
ctggagactgcacttgacaaccactggtttaaaaacaccattcacgttatcatttgaaggagggtaagacagccttgtagtaccacacaaggagggctacrttcttaggggtgtgtaattacaagatgacttagtcaattccatttttcatgtgcatgttttgctttggcagcttgattataaagtctctgtaactcaggg

SEQ ID NO: 774 - DNA, 201 bp, Homo sapiens
ttctaacacgttcccaggtgacgctgttggtctggagactgcacttgacaaccactggtttaaaaacaccattcacgttatcatttgaaggagggtaagasagccttgtagtaccacacaaggagggctacattcttaggggtgtgtaattacaagatgacttagtcaattccatttttcatgtgcatgttttgctttggc

SEQ ID NO: 775 - DNA, 201 bp, Homo sapiens
atttctttgattatcaaaagtacactagctaaggttgctgtccctcttttatttatttatttatttgagacagggtcttgctctgtcactcagatttggtygcactgggtgtgatctcagcccactgcagcctccacttcctaggctcaagcaatccacccgtctcatcctcccaagttgctgggaccacaggtgtgcacc

SEQ ID NO: 776 - DNA, 201 bp, Homo sapiens
aaataaacttacacaattcacaggtgcttagcaacactgctgggaccatgcccagccattcagcctcccagatggatgcttcggggtctcgcaggtcctcyctccaaaggggactttcttaatatctcatgttttttcctccttgcagttggaagaataagacacttttcctttttctttttattcagtaacatttgtcta

SEQ ID NO: 777 - DNA, 201 bp, Homo sapiens
tccaaaattaaccatcacataaattatttgagccaattaattaaatgagtaagaagtctcgatacaacgtcaatatacaacagcaagcacttgctcgttckcaaaagcagatgaactagtttttactgacactagaagcagcatgtgttccatgtgttccacatccatgcactcaaacaaccttgacgtgaaatatttttt

SEQ ID NO: 778 - DNA, 201 bp, Homo sapiens
ataaacaattgaccctgaatcaggggttccacatccatggatttaaacaacattgaagtgaaattttttaaaaaaaattatatctgcactcaacatgtgcrgagttttttcttgtcattattcccgaaacaacacagtataacaacaatttgcatagtatttacattgtactaggtattataagtaatctagagatgattt

SEQ ID NO: 779 - DNA, 201 bp, Homo sapiens
tagaagaggtttcaccagatttgtattcacgttgctgaatctcagtccacccatctctagctggaaatagactacaaagtccctttgtgatactaacagtrtataggcacttacacttttgaaattaggcaatgtgagttctccaacttaattctctttttccatataattttggctattcttattcttattttacagagg

SEQ ID NO: 780 - DNA, 201 bp, Homo sapiens
agccccggggccaggtccacggtgcccacgcgcgctgtgttctgctggggtccggcttagggctgcttcggccctcggcggcttcctctgcgctgttgctrccctccccacacccctacccctgctcactcagctccttcacctcttccctgatgaactggggaacagtatccccaaccttgatcccgcaatgtattgtta

SEQ ID NO: 781 - DNA, 201 bp, Homo sapiens
aaaaacacctcatgtgaagagagatctctctgctacccttgaagatcagaataacataagttcaaagtttctctggtatccagtgaaatctgctccttcgrtttttttgcattgaccaaattgctaatggtgaggaagtaacgagaccaatggaagatgttatttggcacattaattattggggacccataagctgttaga

SEQ ID NO: 782 - DNA, 201 bp, Homo sapiens
tttcccttttaatgaacttttttgactatgcaacgaccagttccggtgggtatatgacaggggagccctgtcacagcgctacccaggacccagttccggtrggtatgacaggggaggcctgccacagtgttgtccagggctttgcagatggtttggaatttccctatcagtgcacttgaacacctttatggaggtctgtcc

SEQ ID NO: 783 - DNA, 201 bp, Homo sapiens
ataataataatatcatcttgatgaacaagaacaggaaagagaatacagataagactatcgccatattcacgtcttttgggatcttgctatgtgctctgcaycatgcagtgggctttccttctcaccagcactgtgcaagtaggatattattattattccctttataacataatccacgtgttttacaagtggaaaagaaag

SEQ ID NO: 784 - DNA, 201 bp, Homo sapiens
catgtatgagtttttgtgtagacacgtttatctttctgttgagtgtgtagtacccaggagcagaatttctgggtcatatgggaacactatgtttcatattytgaagaatgatgtttttgaaagcagctacaccattttacattcccaccagcaatgtctgaagcctccaatgtcaccacatcctggctaacatcgatgatt

SEQ ID NO: 785 - DNA, 201 bp, Homo sapiens
ttgctgccctccccacacccctacccctgctcactcagctccttcacctcttccctgatgaactggggaacagtatccccaaccttgatcccgcaatgtaktgttaaggctgtgttgtatttttaaaacaaacaaacataaacatttgaatgctgaaggcttagtgataataaaaatagtctacccacccccccacatcac

SEQ ID NO: 786 - DNA, 201 bp, Homo sapiens
ctgccaggattccaggttccggtactaccaggtctagggctcccagggttttggtttccagtacttccagttccagagctcccagagttccagcttccagyacttccaggtccagagctcccaggtttccaggttgcagtccctccagtcccagagctcccagggtttcggtttccagtacttccaggtccagagctccca

SEQ ID NO: 787 - DNA, 201 bp, Homo sapiens
ataacatttagcataaaatgaggactcaattactactgatggttgcccaattgtaattggtaaattggcaaaaagtggtggtttttaatggtcaataaagrtaccatgtatctagtcttaggaaacaaaaggtttattgaaatgcatgtagataaattatcatcagcataaaactgttatggagttttcaacatggggtct

SEQ ID NO: 788 - DNA, 201 bp, Homo sapiens
aagtcagttgaattaaacatttaagtattagtattctttcaaacagctctacctcagatagcatttgtagcaaccttatattatatgtatacatgctgtawccactgcattagattgtaaactgatttctgtggctacggcatctaacatatatagctgtacttaacatagttgtagttaacactcaataactatgtaatg

SEQ ID NO: 789 - DNA, 201 bp, Homo sapiens
actttactggacatcctgtactttatctggcaatcctaccttgcctcaaattctgcttcctacatgaagccaatcctaatagagtaatagctaatgtgtaytgaatgtttactaagtcttgggttctttgctagacattttgcagggtacctgattcaatgtccaattaaaaggaatctcatgttctttcatacttcctta

SEQ ID NO: 790 - DNA, 201 bp, Homo sapiens
gctaaatgtccttaatagaagacttgaaatcaataaatatagtaagagaaaaaaggaagaaactttcagagaatttctgaaactttgtgggtcaatagaarttagcagttaattttctacaaatcatcctcagggtaaagtgagtcatattctgtttccgcagggtgctctggtctgacctgtttggctccccccaggtgg

SEQ ID NO: 791 - DNA, 201 bp, Homo sapiens
ccaccacacttaggaccaggcagacgatcctcatggaaaacatcttttctaagggtggggctggctcctgaggagcactccagctgaaagaaaggattgcygccactcctagttcccatcctatttaaatctgcaagaggtttggttaatcattggctttgtcctgtgtagacagtcaaccctccctctacgtcctttgtt

SEQ ID NO: 792 - DNA, 201 bp, Homo sapiens
ggcttgatgagtaattggatatagggaggtagaaattggatatggggaggaagattggaggatgagtcactgttttttttgcatttgaggactggatggartagaacaggtttgggagagtggagaacactaagcataccatgtactatatccccaaatccaacacaatggctaccacaaggaaggcattcaataaatgtt

SEQ ID NO: 793 - DNA, 201 bp, Homo sapiens
ccccctaatgaatcacggttaccatgagaaggatgacctcatgttattgaagaaaagtcctggtctgagattcaggaaacaagattcagatggcttgtgtycagtgtttagttctggacccatttctggggctaagtggctatgtgattttggttgttcaatttatttaacttctcagaaccttggttttctcatttcagg

SEQ ID NO: 794 - DNA, 201 bp, Homo sapiens
atacacattatatatacatatacatacatatgaaacctttgctgttagatatgtcagataatacagaatgagtggtaatcatttaacacatttcatgttcygtggtgccagaaatgggtaggctgtctagtaaatagattttgttaattagtacattctgtgatataatctagttgtgctgaatttcctgagatgcttgga

SEQ ID NO: 795 - DNA, 201 bp, Homo sapiens
cctaaccaaacagtacaactttaacaaaggtcagtcaaatcctagaagatagggaaatgagggagtttatagcattgtgttgtgcatattctctagaataygcagaactagggctagaatgtgtcatagagaaagccaagtaaccttcacctggccctttccttaggtttgtctgtcttggtcccatgctttagctcagct

SEQ ID NO: 796 - DNA, 201 bp, Homo sapiens
agactaaggaatgatctgaggtgccctggattgagacaaattgaacagagaagttggatttaagtgttttgctgtgccacattggtatctgctactggttkgtttgtgtttttccatctttgtgtaatctacgattttaaatctctcaccccatgaaagaattttcatgactaaatatgattagcaggagatttacaagag

SEQ ID NO: 797 - DNA, 201 bp, Homo sapiens
ggtttttccacgcagtaccttataactcctggacaatgtgcatttgggaaggtatttgtttattctgtgtcttgcctacacaaagcttcctgaggccaagrcacaaggactggcacaaatgtcaggcatagagcaattgctgctcagtatctgctggagaaatggaaggctgtcaccatatggtggtgacaatgcatggtg

SEQ ID NO: 798 - DNA, 201 bp, Homo sapiens
aaataatacctacttttaggtagatgatggatataacacttttctctgcatatagtagacactcagtgcataactatcgccttccttttccctctactcaraaacaaggacatctgggaccacagccacatacttacctccagtcgtttcatatcaaccaactgagctctaacatttttctgcagaagctggatatgctgt

SEQ ID NO: 799 - DNA, 201 bp, Homo sapiens
ttcagtgagttttaccttaaaatattggcttaaaacaattcaaatcaaatggataaaacaactttttgctttccaatggcattatgattttgggtggtatrggaagagaagttctcaaaccaatagtcttcaaggttgcagagagaagcttctgtctgccactttcctgatgtactgaatggcccttggtatatctttata

SEQ ID NO: 800 - DNA, 201 bp, Homo sapiens
actgacttcccccatgtcccagttcactattcccaggaatgaatgaccctggaaatacattcctgtccctctgtgtcaaccatgttcataggctctcactyctcagggagcttttgagctcaatcttccctttgtctgaaggtgggcatggcaccccatctgccacagagaaaagagccaggagcccacttcattgttcct

SEQ ID NO: 801 - DNA, 201 bp, Homo sapiens
ggaggaggatgagatggtagcaggagaggctggatgtaagaaagggaacaggaagtgggtgattgcccttatcctggcaagagatgtatctcaactacaawggtgacaatcggtatacaggaaaaaagtgaatatgataaatatataggaggtgaattcagcaggcttgatgagtaattggatatagggaggtagaaattg

SEQ ID NO: 802 - DNA, 201 bp, Homo sapiens
atagtcaaactcacggaagaaaagtgtagaatggtggtggccagggcctgaggcataggagaaatgggggagatgttggttagagggcacaaagtttgagytatgcaatataaataagttctggagtccaatgtgcagcatggtgactatagttgataatattatgctgtatatttgaaatttgctaaaaaggtagatctt

SEQ ID NO: 803 - DNA, 201 bp, Homo sapiens
gtaataaacaaggaaaatacctgggaatttgaaactctaaaatgttctcctattttattaagtacatactaaaatatttgatataatgaaaataatttacraagacaaaataaatgacaagtggtcataaaaatgcaaataaagtcaatcattttattattatatatttaggaacaaagttgaaatgttatctcctcaaat

SEQ ID NO: 804 - DNA, 201 bp, Homo sapiens
ctcatccaacccccatcctaaaataagtgtctactgtcctcagactggtctcttctctcaagctttcacaaacccctgcccttaccagtgcttgccttctytttattctgttcctccaaacacctgttcactgcgtgtatctgacacaaagctcatgggaagccaggttaatgtgtcaacaagcatccatgtagtaatgtt

SEQ ID NO: 805 - DNA, 201 bp, Homo sapiens
cctgtgctcttaaccatgaatcttaatacaaccatgaagcccttcttaatttaaaataatacacagatacaaggtgttatgagactcaaagttattcactratagaatggattttaaagatgtgtgtgtgcatctacataactgtgtgcatgattatttgaacacacatttacatctatctaccaacttatctatcttctt

SEQ ID NO: 806 - DNA, 201 bp, Homo sapiens
cattagacaatctcaaatcttgtatacttcctctttgttagagtatttaatactgaagatatgccataatcatttcttgttgcaaaaagaatttaaaaacyaacggtatcagtttttttctattgaagtttaaaattagattttggtaattcagaaacaaaaagacaaatacagcatgttctcagttataagtgggagcta

SEQ ID NO: 807 - DNA, 201 bp, Homo sapiens
gcaaacctgttaaagtgcttccaaaatagagctcattgtgtgctactcccacttcattattatgtttttttccttgatcagcctcaaaatcccttgaaaawctcattctatcaggtgagaaaggcctcacctcagcagggagaaagaaatgaatgtcataaactctggtaactctggtttttcatatggtcatggccctaa

SEQ ID NO: 808 - DNA, 201 bp, Homo sapiens
ttcctaccctatctcttccagataagttggcttaaaagtaggtaagaggactagttagaggtcgcagagaaactctggaatgagggtccacttagccatarattaggtgccaggaaattgaggccacaatactcaggagcctggttttgcctgagcatgcaactgaaatcctgtctgttcacccactaatgatccagagtt

SEQ ID NO: 809 - DNA, 201 bp, Homo sapiens
attgtaagctttggaggagtaggttttgtttagctggaaaaccatgcaaattaataggcatgatacgagtatcattttttaaaaagcatgtgacaataagsgtatctttaaatgtgcaaaactggaaaaaagatggaagaaattttcagttgcttaaattataatctgccgtgcattggctttttctttttgagatggagt

SEQ ID NO: 810 - DNA, 201 bp, Homo sapiens
tttcatgcactgtataaggaaggagccaaccttatgaaacagaattcctaaaatgcagagaccacacacatgcacagaaccacagagtgaggtctttttayacacacacacacaaaaacatgatgaaaatctcataactataatcccagtgctttgggaggccaaggcaagaggccaggagtttgagcctccagtgagcta

SEQ ID NO: 811 - DNA, 201 bp, Homo sapiens
atatacacatatataattatatatatgtatatataattatacaattaggactgaaagtctgcaacaaactataatggatgtatgcacttgggacataagcytctagttcctctttatttatgaaccaagagaaacagctaactcagggattgtttttaaactgactacagattcccaccatggggcaaaaatatgggtgac

SEQ ID NO: 812 - DNA, 201 bp, Homo sapiens
aatgttgaatgtatataaatattatctactaaaatatatataatgaaaatatgtaattattgatcattcacaaagatttacatagtacactgataattacrtcttgctaactttttaatatgatttgaacatgaaaggtgactcaggcattgcctttgccttcaagaagtgtgtagctcaattggagaatgtataaataaa

SEQ ID NO: 813 - DNA, 201 bp, Homo sapiens
tacgtcttccaaactctgtacttgaaatgtgagcaaggaggtgtaagcacaggagagagtttagatatagatcccaagaaaatcttatagaaaaaagttgrcattttaattctatggacaacgaatgctttctttattaaaggatcccagtataactggctacccattcacaagaagataaaagtagattttcttcatgac

SEQ ID NO: 814 - DNA, 201 bp, Homo sapiens
gggtgtgataatatacattcttttcacctatgaaacatttgcaaaagttaacgcaacttgttcacaaagaaaaccttaaaaattctatactttgggagacmgagacaggaggattgcttgaggccaggagttcaagatcagcctgggcaacatagcaagactctgtctctacaaaaaatgaaaaaattagctggacgaggt

SEQ ID NO: 815 - DNA, 201 bp, Homo sapiens
tttccttttcattctgctttcaaaccacaaattcatgtgtggatagatcttaaaaacacaatgctgaaataaaaaagtagtaagtatgatgaagacttcarcagtgattgtcaaaggatttgtggtgaaggactagttttattaaaattctaatcagccacagaccaggtttttatagaattcaataaaaataattactaa

SEQ ID NO: 816 - DNA, 201 bp, Homo sapiens
ggatagagatagcatgaagttctgatgtctgaaagaagtgaagcttcatttgattctgaagaagttcttgtccaagtatccaaccatttgaaggtatagcrtttagtttgtatcagagatttacaattccccataaagaaatgcaagaactctggggttcatctgtgatgcatttgcaaggttatttcccctttgatcccc

SEQ ID NO: 817 - DNA, 201 bp, Homo sapiens
tactaagcttagatttgttttctcacatattctttcggagcttgtgtagtttccacattaatttaccagaaacaagatacacatctctctttgaggagtgycctaacttcccatcattttgtccaattaaatgaattgaagaaatttaatgtttctaaactagaccaacaaagaataatagttgtatgacaagtaaataag

SEQ ID NO: 818 - DNA, 201 bp, Homo sapiens
tttagagagttccagaagaactcacacaccaaaaataagagaacaacaacaacaacaaaaatgctaagtggattttcccaacagatcataatgacattacrgtacatcataaaaatatccttagccagttgtgttttggactggcctggtgcatttgctggttttgatgagcaggatggggcacaggtagtcccaggggtg

SEQ ID NO: 819 - DNA, 201 bp, Homo sapiens; identical to SEQ ID NO: 198

SEQ ID NO: 820 - DNA, 201 bp, Homo sapiens
aaagacaaggcacatggacaggcagttcacagaaagaccactgacattgtggctgatatgtaaattgaaaagattctcagtgtgctcatgatgaaagaaawtttaatcacaataacaataagataacatatttcacctaataggttggcaaaaaattttaaaatttgacaacaacaagtgatgacaaggatgagggacaac

SEQ ID NO: 821 - DNA, 201 bp, Homo sapiens
ggcttcgccaaggtctccccggcccccagcaaactacctgctatgaagtagatgctctgtaaatagttgttaagcacaaattgccttgtgctatggagacygggcctgacatgagttgtaaaagtatcaacaagtgtattgacaatgggtatcggcaagtctttgcccttcaagccagagagctgctgggcaggacagatt

SEQ ID NO: 822 - DNA, 201 bp, Homo sapiens; identical to SEQ ID NO: 199

SEQ ID NO: 823 - DNA, 201 bp, Homo sapiens; identical to SEQ ID NO: 810

SEQ ID NO: 824 - DNA, 201 bp, Homo sapiens; identical to SEQ ID NO: 811

SEQ ID NO: 825 - DNA, 201 bp, Homo sapiens
tgttaatgcctggaaagactttgggaataattagattgtactatcagttataaactgtcagttataaatatcttagcaaggtgtatgtgtgtgtgtgagaragagagagagagtcctcgggtcttacttatcacaatttcaccatcctctactacatgaagccccatctcatgtgtattagtttgctagggctgatgtaac

SEQ ID NO: 826 - DNA, 201 bp, Homo sapiens; identical to SEQ ID NO: 813

SEQ ID NO: 827 - DNA, 201 bp, Homo sapiens; identical to SEQ ID NO: 814

SEQ ID NO: 828 - DNA, 201 bp, Homo sapiens
ttccccttccccttcttcttctcctcctcctcctccttcttcttccagcaaatatcaaatttggagagacaatctggtagatttagcttgcgtaaagggtytgtctacccctagcttggtcacctgtggttagagggtcagggtgttgtagtactgacaggaccactggagcttcatacctccattttaggggtcattcca

SEQ ID NO: 829 - DNA, 201 bp, Homo sapiens; identical to SEQ ID NO: 787

SEQ ID NO: 830 - DNA, 201 bp, Homo sapiens; identical to SEQ ID NO: 788

SEQ ID NO: 831 - DNA, 201 bp, Homo sapiens; identical to SEQ ID NO: 790

SEQ ID NO: 832 - DNA, 201 bp, Homo sapiens; identical to SEQ ID NO: 792

SEQ ID NO: 833 - DNA, 201 bp, Homo sapiens; identical to SEQ ID NO: 794

SEQ ID NO: 834 - DNA, 201 bp, Homo sapiens; identical to SEQ ID NO: 795

SEQ ID NO: 835 - DNA, 201 bp, Homo sapiens; identical to SEQ ID NO: 796

SEQ ID NO: 836 - DNA, 201 bp, Homo sapiens; identical to SEQ ID NO: 800

SEQ ID NO: 837 - DNA, 201 bp, Homo sapiens; identical to SEQ ID NO: 801

SEQ ID NO: 838 - DNA, 201 bp, Homo sapiens; identical to SEQ ID NO: 803

SEQ ID NO: 839 - DNA, 201 bp, Homo sapiens; identical to SEQ ID NO: 804

SEQ ID NO: 840 - DNA, 201 bp, Homo sapiens; identical to SEQ ID NO: 805

SEQ ID NO: 841 - DNA, 201 bp, Homo sapiens; identical to SEQ ID NO: 806

SEQ ID NO: 842 - DNA, 201 bp, Homo sapiens; identical to SEQ ID NO: 809

SEQ ID NO: 843 - DNA, 201 bp, Homo sapiens; identical to SEQ ID NO: 812

SEQ ID NO: 844 - DNA, 201 bp, Homo sapiens; identical to SEQ ID NO: 815

SEQ ID NO: 845 - DNA, 201 bp, Homo sapiens; identical to SEQ ID NO: 238

SEQ ID NO: 846 - DNA, 201 bp, Homo sapiens; identical to SEQ ID NO: 239

SEQ ID NO: 847 - DNA, 201 bp, Homo sapiens
gcccacccccaccatgtgtctgatccatcccagtgtttagttctggcctagacatttgcctatgacctgagtccatagatcctaactcctgatgtggccasgatagactctgtgatgttcgtaatggatttggatgggctgtgagatgctccttgcttgagtatcccagaaaacgagctgcgtaaaccaggttgccagctt

SEQ ID NO: 848 - DNA, 201 bp, Homo sapiens
actgtatttttaattcattttctcttatttttactgtggggtttcatattactttaatagctgtttatatttgtaaggtgctttgcacttcccatatgccrtgtatgtggccctatttggtcctgggaacaataccatgaggtagataaggaagacattgtcctcattttataggtgagtaaaaggagactcaaagatgat

SEQ ID NO: 849 - DNA, 201 bp, Homo sapiens
aatgctggaacaactggagagtgcagggattgtacacaggctgagggccccaaacatcacattcagaatggcccggagggaactgcactttaatggggtgscacaggacagcagaaccctcagccagcagccacagggcctgccagccagcacaacagagcaggtttttgcagtaatgatagatccaggcgataagcacag

SEQ ID NO: 850 - DNA, 201 bp, Homo sapiens
atggagtgtgggctgacacagaccgaccacacattgtaatcacatccacttgcataaactcttcacccaaacgccgatgtagagaccggccatgacccccmcaacacataccacagtggatagcacgtgccctggctcaagtctgcaaggccctgagagctgaacgactgtcacatggaatatccaaggacatcaacgctg

SEQ ID NO: 851 - DNA, 201 bp, Homo sapiens
tgtaagttggtcaatcactttagataattatctggcatcatctgcaactactactaaatagtcacataacctgtgactctgccatgccactcttaggtatyatatacccagtagaaatatgtacatgtgttcactaaaaaaacatagcagcactattacttttttttttttttttgagacggagtcttgttctgttgccca

SEQ ID NO: 852 - DNA, 201 bp, Homo sapiens
gctaatggacagtctcggtggagggctgggctgttgggacctaagccccacagctgcaatcactgggttcggaggcagggcctgacacacctctctccccytctcccgcttcctcccaggatcgctggttctggcgtctgcgcaataaccgagtgcaggagggctaccccatgcagatcgagcagttctggaagggcctgc

SEQ ID NO: 853 - DNA, 201 bp, Homo sapiens
gcggacacactgcaaggtcaggaggcaaacagggcaggtagatttctgacctctgccccaacaaagattaaagtcctggagcatgtaccgtgtgtccttcrgaggatggtgagcagctttgctctggggaagggggtgagcaggtgacagctgcagctggggagccaggctaggcagaagcggtcaccacctttccacgga

SEQ ID NO: 854 - DNA, 201 bp, Homo sapiens
ggagaaaatgtgtcctatgtatttccttcccagttctttgaaagagagtgataggaaaaaggaacactattgaaggaaggactgcccagtttcaaacaggwatttatttttctctcctaggcttcccctgcaggatgtttggcgcatctatagtggcattttaaatctgtcagacattacaaaagatacacctttctcaca

SEQ ID NO: 855 - DNA, 201 bp, Homo sapiens
gcttgccatcgagacatttataaaggagttgatatgagaggagtcaattttaatgtgtctaaggttagcagtgttgaagaatgccaaaaaaggtgcaccartaacattcgctgccagtttttttcatatgccacgcaaacatttcacaaggcagagtaccggtgagtacaattcaaggtgtgtgttctttgtattggtgcc

SEQ ID NO: 856 - DNA, 201 bp, Homo sapiens; identical to SEQ ID NO: 710

SEQ ID NO: 857 - DNA, 201 bp, Homo sapiens; identical to SEQ ID NO: 332

SEQ ID NO: 858 - DNA, 201 bp, Homo sapiens; identical to SEQ ID NO: 712

SEQ ID NO: 859 - DNA, 201 bp, Homo sapiens
taaagcggggatggtattcacaacatttaacttatagggtccaagcactgaccaacctgaccattagaacagagtgtggtctctgtacagggcagatggcrctgagtgggtattctccacagaaagagaaacgaagacagtaccccactcctccaacccaccacccaccaccaatcccaccaccaattccaccaccaatcc

SEQ ID NO: 860 - DNA, 201 bp, Homo sapiens; identical to SEQ ID NO: 206

SEQ ID NO: 861 - DNA, 201 bp, Homo sapiens; identical to SEQ ID NO: 716

SEQ ID NO: 862 - DNA, 201 bp, Homo sapiens
atgggtgccaacttggagcctggggttgctggggctaacgtggaggctagatagagtcttgggggccaggctagagctggagcaggcctgaagtctaggtyttgtgtggccatcttggagcctgaagccccaggggctgacctggtctggggtgagcatggggctgaggccacagaggctggtctggcctgtggcaggcct

SEQ ID NO: 863 - DNA, 201 bp, Homo sapiens
ttgaaggatctatgatcagctgcttcaccgccatgtgactttatgaatagagacgtgttaaagcggggatggtattcacaacatttaacttatagggtccragcactgaccaacctgaccattagaacagagtgtggtctctgtacagggcagatggcgctgagtgggtattctccacagaaagagaaacgaagacagtac

SEQ ID NO: 864 - DNA, 201 bp, Homo sapiens; identical to SEQ ID NO: 721

SEQ ID NO: 865 - DNA, 201 bp, Homo sapiens; identical to SEQ ID NO: 722

SEQ ID NO: 866 - DNA, 201 bp, Homo sapiens; identical to SEQ ID NO: 723

SEQ ID NO: 867 - DNA, 201 bp, Homo sapiens
tttaaaggacattttttcacttaggatgtttagtactatgaataataaatagtcacaatttccttaactatggtgacaaaatacaagcaaatttagcctcrtgtcatttcctaaggaacatcttctctctgtgagttcacaggttgccacatgaacatcttccagcatcttgcgttctcagatgtggatgttgccagggtt

SEQ ID NO: 868 - DNA, 201 bp, Homo sapiens
acgggtgaatctgaagcttttttggtgaatccatagtaaatgaaagacccactaagacataatctagggtagtgagtctcaagcttgaaggagctcaggayttatctggatcagctggagtacaaattctctgatcctccccagctatagatgtgcaaggtgggatcagggagggaaactcaagactcttcatctttaaca

SEQ ID NO: 869 - DNA, 201 bp, Homo sapiens
ggagaggtggcttgatttacatttaatctctgcaatttattagagtcctgtagttggatttactttgaagagagtttcccagaagaataaaatttgctgcrttgctttttgggtgtgagctgcttttgtatttgcctaatgcctttaatgcaaatttctttctttctctcttgcttttttttaaaaaaaatagaaatgttt

SEQ ID NO: 870 - DNA, 201 bp, Homo sapiens
tttcttaagattatctatggatggttctccaactaggattgcgtatgggacacaagggagctctggttactctttgagattgtgtaacactggggacaackctggtgagtaacctcactttttcgtggacctgtcagggatgtctgtcatgttgatagtttgcttagtcttaaggaattatgtgtcttgttctccttggtt

SEQ ID NO: 871 - DNA, 201 bp, Homo sapiens; identical to SEQ ID NO: 724

SEQ ID NO: 872 - DNA, 201 bp, Homo sapiens; identical to SEQ ID NO: 725

SEQ ID NO: 873 - DNA, 201 bp, Homo sapiens; identical to SEQ ID NO: 726

SEQ ID NO: 874 - DNA, 201 bp, Homo sapiens; identical to SEQ ID NO: 727

SEQ ID NO: 875 - DNA, 201 bp, Homo sapiens
ccggcccatgaaggcagccgtaggggctgtaccctgcaaagccacagggacagagctgcccaaggccttaacagcccacaccttgcatcagcatgccctgkgtgtgagacaggggctccaaggagattattttggagctttaaaatttaatgacttccctgctaggttttgcatatgcttgggacctgtggcccctttatt

SEQ ID NO: 876 - DNA, 201 bp, Homo sapiens
ctccatgttttgtgcatacatgaaatctaggcaatacacttgtattcccaaaagcttccacttgaagagatctgtgctctttccaaatataaaccttaccygagaggtggtcatcttggccacacctcagagagggagagaggcagtcttgttgggttgggtggtcataatggggctcagggccaaatccccagggggtag

SEQ ID NO: 877 - DNA, 201 bp, Homo sapiens
gcaaaataaatcatgattatggctaggaaaatcagggatgtaagtaagcaaaaatttagaaactacatattgcatgtagtccccaaattcagaaacagtcrtcgttaaacatcttttatttagtctttcagatatttttctacatatacctatttgcacatttcacaaaaaagagttattaactgtggacactctttgact

SEQ ID NO: 878 - DNA, 201 bp, Homo sapiens
cctcctcccacattttattattcatgccatagtttatatcttttgtatgttgtgtattcattagcaaattgttgtagttatagttatttgttaatactttkgttttttaacttttatactagagttaaaagtgactgttgcacaataacagtattggagtattctgtatttgactgtataagaatacctttaatagagttt

SEQ ID NO: 879 - DNA, 201 bp, Homo sapiens
acattttacataaatggaatcatgcaatgcagcacattttgcatctggcttttttcacctggcgtgttttcaaggctcattcgtattctagcatatatcartactttgttcctatttaggactaaataagattctattgtatgaataaaacatattttgtttatatacttagtttgatgaacatttgagttgtttctggat

SEQ ID NO: 880 - DNA, 201 bp, Homo sapiens
tacatttaggcatttgatgcattttaaattaaattttgtatatggtgtaaagtagcaatccaacttaattcttgcatgtgggtattcagttattccattgycttgaaacccttttcaaaatcaattgtctataaatgtaagagtttatttttggaccatcagttctatcctgttgacctatatatgcctatcctaatgcca

SEQ ID NO: 881 - DNA, 201 bp, Homo sapiens
ttacacacagtcttgattaccataactttgcagtaagttttgaactcagacagtctgagtgcttttattttgtcctttttcaagattaatttggttattcyggatcttttgcatttccatatgaattttaggatggttgtcaatttctgcaatagaaaagcagcaggattttgatagagagtgcattgaatctgtagacca

SEQ ID NO: 882 - DNA, 201 bp, Homo sapiens
gaagattaagtgacacatttaaaatgcttagtactgtgtgtagaacataaacacttcaaaaaatgtaaactgtgatttctatattcaataagaaatgtagmaatggacaaagcatataaaaagcaaaagaaatactagaagacacttgatttttctcaaaaataaacacaccaagtatttttgttttagtgaaattcatgc

SEQ ID NO: 883 - DNA, 201 bp, Homo sapiens
accttgcatgtgactttaaggtggttggcctggaagaaaagtcccaagatgggaaatagtaggtgtcttttttactaaatgcactccaatttgggaccaaraattttcattcttgaaggctcagtattgtgagtttataagagataatagacataaaagtgtaatgatttcattgcaaataaaaaaaggcccctttgcacc

SEQ ID NO: 884 - DNA, 201 bp, Homo sapiens
cctgacttcttgacagttctgaatttagtggagcaatgaggttcagctttggtgaatgagcttaatttttccatgataaactgctagtttcttcccactayagtgtctctcaaaaatgggacagcaacattctttttgttttcacttgcagtaagcatgatgcaattacataaatgtacacttttcaatttgttaaataga

SEQ ID NO: 885 - DNA, 201 bp, Homo sapiens
gcaacacagtgagaccccgtctctacataaaattagaaaaaaacaattaactgggtgtggtggtgtgcacctgtagtcccagctagtcaagaggctgagayaagaggatctcttgagcccaggagctcaaggctgtagtgagccaagatcgtgccactgcacacaaacaattatgtgacctcgggcaagttgctttacctc

SEQ ID NO: 886 - DNA, 201 bp, Homo sapiens
ctcttaatttccttatctgtaaaatgaggatgataatttcttcctgggtctgttgtaataattaatacatcaaagcacttcatgtctggaacagtgaagayaccctgctatgactattaaggatagtatacatggaataagacacaggaacttctaaatgcttttgaccatagatttaggttctgagttttaagaatttaa

SEQ ID NO: 887 - DNA, 201 bp, Homo sapiens; identical to SEQ ID NO: 743

SEQ ID NO: 888 - DNA, 201 bp, Homo sapiens; identical to SEQ ID NO: 744

SEQ ID NO: 889 - DNA, 201 bp, Homo sapiens; identical to SEQ ID NO: 745

SEQ ID NO: 890 - DNA, 201 bp, Homo sapiens; identical to SEQ ID NO: 746

SEQ ID NO: 891 - DNA, 201 bp, Homo sapiens; identical to SEQ ID NO: 747

SEQ ID NO: 892 - DNA, 201 bp, Homo sapiens
tacaatttttgaaataaaaatactagattcaaaggtgtgaatatttttgaaggttttgtggtgtggtatcatgaaattaggtttcagaaagtttactccayagttgactttttctaccagctaataagagtgctcatttaccccacttaggccaactctaacaggcttctgttgctttgcatcctgacatatttatctttc

SEQ ID NO: 893 - DNA, 201 bp, Homo sapiens
caaataagtaatatattttggagcttgctattcttctctttttatggtatttttgtgtgcacattcttatgctcttattcagttatttctgtagaatacawtttttgaaataaaaatactagattcaaaggtgtgaatatttttgaaggttttgtggtgtggtatcatgaaattaggtttcagaaagtttactccatagtt

SEQ ID NO: 894 - DNA, 201 bp, Homo sapiens
ccaccctacttgggaacccaagagccagtatattgccgtttgcttaaaaggactgtctttcatttatgaccaaaagcgagttagtgtgtgtcaggtcagcygaaggatgaaggaagggcccccattctctggatatgatcttaggtcttcaccctattttctttgtgctgttcaataattctctgtattggatcatcagca

SEQ ID NO: 895 - DNA, 201 bp, Homo sapiens
gtgctatttctgattgttgtatcttgtagcaaaatttaaagaaaaagtaatttgtgcctttctcaatattcctgttattgttcatgtattctaaaactcastgttactcacttagcttgcttttaatgttttttaaagtgaaaaattgttcccaagtacataaaatctctacactcaagaacaattctagtcaaaagcatt

SEQ ID NO: 896 - DNA, 201 bp, Homo sapiens
tcctgtaggaatgcttgaccactgcagtttaggcattttgaagtttttgtgtgtgctggagatgtggctgggttttgtctcacagcagaggcaaggaatcrcaactcagaaatacattgctacttggctgcctctattattgtacatcttgaaggcgaggttaattaagtcctcttgtggggtttgagggctggaatctaa

SEQ ID NO: 897 - DNA, 201 bp, Homo sapiens
tttaacttatagggtccaagcactgaccaacctgaccattagaacagagtgtggtctctgtacagggcagatggcgctgagtgggtattctccacagaaasagaaacgaagacagtaccccactcctccaacccaccacccaccaccaatcccaccaccaattccaccaccaatcctgccacccaccaccaatctcaccac

SEQ ID NO: 898 - DNA, 201 bp, Homo sapiens
gaatgcacatcaccaccctgcattataaacccttttggttttagtatctctagcattttgtcatttatgtaaatgcagacatcggtaaaatgaggccagartgaaacgggtgaatctgaagcttttttggtgaatccatagtaaatgaaagacccactaagacataatctagggtagtgagtctcaagcttgaaggagctc

SEQ ID NO: 899 - DNA, 201 bp, Homo sapiens
gggccaggctagagctggagcaggcctgaagtctaggttttgtgtggccatcttggagcctgaagccccaggggctgacctggtctggggtgagcatgggkctgaggccacagaggctggtctggcctgtggcaggcctgaatcctggtgctggggtttactggagtgggcttggtgcttgggatctgtggtgaagttagg

SEQ ID NO: 900 - DNA, 201 bp, Homo sapiens
ggctaagacaggagtagccaagcaagtggcaccacccctggagaaagctattgaacatacagcttcgggggtggagattgtccctgatgattcaggacacrtgtctatttaatgttccacaacaaggaccacttgtcaggtatattgctgtagacatatgttgcagaccagaggaaggagctcagaagtaggaatgtcttg

SEQ ID NO: 901 - DNA, 201 bp, Homo sapiens
tacaaattctctgatcctccccagctatagatgtgcaaggtgggatcagggagggaaactcaagactcttcatctttaacaggtgttccaagccattctgrttctccttccacctactgcgaaaatgtaaagtggctcgcttcctatgacaggacctcttgtttctcacatttggggtaaatctataactaaagcgatggt

SEQ ID NO: 902 - DNA, 201 bp, Homo sapiens
ctttttaagtaaatgaaagtatttgcaaaaataattaccaattgagaacatagttgcctgaaagtttaagaacacaggaaaaatcattaactctttaatayggttgatttcctgtacttaaaaaatgtgagtgtaaagaaaacgcagtgatggagttagatattatggggtgttataaaattagctctaagagtgttcttt

SEQ ID NO: 903 - DNA, 201 bp, Homo sapiens
tctggaggtctcaatttgtatcttgggaagcattataaattttccaactccctagacacaaatgtaccaaaaaaaaacccttgttttctataccagtaatygtgtgctttgtcttgcaattcagacatttacaagaaaatctaaatcaccttaaattaagatttatgttaaatgtggtctaaaaccagcagagttatgtat

SEQ ID NO: 904 - DNA, 201 bp, Homo sapiens
gtgagtcagttaaacctcttttgtttataaattacccagtctcaggtagtatctttacagcagtgtgaaactggactaatacatctgggaaattctttttstctccttcctttctgaaggacagctttgcctgatattatattcttggttgccaggttttgtactttcaatactttgaatatatcatcccactctctcttg

SEQ ID NO: 905 - DNA, 201 bp, Homo sapiens
ttgggagatgattggatcacgaggtgttttcccccattatgttctcatgatagtgagggtgttctcatgagatctgatggtttaaaagtggtggttacccstgcgcacatgctctctctctctcctgctgccttgtgaagaaggtacctgcttccccttcaccttccaccataattgtaagtttcctgaggcctccccagc

SEQ ID NO: 906 - DNA, 201 bp, Homo sapiens; identical to SEQ ID NO: 766

SEQ ID NO: 907 - DNA, 201 bp, Homo sapiens
atggtgtgtgtgtgtatgtgtgcttgtgcttgtgtgaatatgtattattaactggaaatttgtaaaagtattggaaaaatagtacttacgattttgtgtgygtgtgtgatggagtctcgctttgtagcccaggctggagtgcagtggcgtgatctcggctcactgcaacttccacctcccaggttcaagcgattctcctgc

SEQ ID NO: 908 - DNA, 201 bp, Homo sapiens; identical to SEQ ID NO: 767

SEQ ID NO: 909 - DNA, 201 bp, Homo sapiens; identical to SEQ ID NO: 769

SEQ ID NO: 910 - DNA, 201 bp, Homo sapiens; identical to SEQ ID NO: 770

SEQ ID NO: 911 - DNA, 201 bp, Homo sapiens
ctctttatcctagtagataagtttttggcacgttctttctccttcccatcattatctctcctctttacccgtcactttctttctgttgtggtttgcatttrttgatctctgcctttcctgatactactcaatttatgtttcacagaaataacggctgtacttaaatgaaactcagattcctatataaaaatgttgggataa

SEQ ID NO: 912 - DNA, 201 bp, Homo sapiens; identical to SEQ ID NO: 772

SEQ ID NO: 913 - DNA, 201 bp, Homo sapiens
cagaggaaaactctgcttttaatgggctcatgtaataagatttggcccactctgattgactccattttgattggcacaaagccaagtgtttagtaatcttraccccatctgcagaattgcttttctcatgtaacataatcatgggcagatgtgatatctcgttttattcactgtccccaggatttgagtgggagatttggg

SEQ ID NO: 914 - DNA, 201 bp, Homo sapiens; identical to SEQ ID NO: 334

SEQ ID NO: 915 - DNA, 201 bp, Homo sapiens
tctttaaagtagtagaagctagtcattttctattcaaagcctcaaaatgcttgaatatcattgggctaagggattgtctcaagaaagagtctaacaggtgmacatttcatctgaataaagaaacagatttaactgtgtgacccatgatcacattagcggatagcacagtccaaagaaaataacataagacaagcattttgc

SEQ ID NO: 916 - DNA, 201 bp, Homo sapiens
gaggatgataatttcttcctgggtctgttgtaataattaatacatcaaagcacttcatgtctggaacagtgaagataccctgctatgactattaaggatartatacatggaataagacacaggaacttctaaatgcttttgaccatagatttaggttctgagttttaagaatttaactcaggaaattgtaacaccaaaaat

SEQ ID NO: 917 - DNA, 201 bp, Homo sapiens
agaatcatacatacactttggaaaagatggggcttaatcgcactttataagacttgaaggatgtttgagaatcactatgaaactgctgaaaataccaagaraatttaattcttatgtatataaataatgtgtctgttttacatgaatcccttctacaagcttggtatttaatatggcatatattgttttttcatagtagat

SEQ ID NO: 918 - DNA, 201 bp, Homo sapiens
attctttgggaaaatctctgtttaaatcttttggccattaaaaataattgggttattttcattgttgagttgtatgaactctttatatactctggatactrcactcttatgacatatattattttcaaaaattttctgtgcatctgcaggtcatcttttcactttactgatggtgttctttgaagcaccaaagtttttaaa

SEQ ID NO: 919 - DNA, 201 bp, Homo sapiens
tgactgggtgataaaatgcatattgagaataagaggccttctgacccttctgggtctagggctgtaaagcgtctcagggttgctgccaaacgggccatgamctgggctgggtttttcatatttgatgaaaaagagcctaaacgctaactgatttgggagaggtcggataaataaaaaggaacattaatcttgactatgcct

SEQ ID NO: 920 - DNA, 201 bp, Homo sapiens
gaaaagggtgcttaaatagaagttaacactattttaaagcaagaatggaagtggtttcatcatgcgtaaacaacaactctccacattttgtaatgattgakctggatgcaatttgtcatcagacaggagaagtcgaaagcaaagaaataacactgggagatagagaagctctttcattcaatgcgaaaggtcaaaggcaca

SEQ ID NO: 921 - DNA, 201 bp, Homo sapiens
ttatttttatttgcatagatgtatggggtacaagtgtaattttgttactttgatgtattttacagtggtaaagtctgggcttttggtatatccatcactgsagtcatgtacattgtacccactaagctatttttcaacgcccgcccccttcccacctctctgtcaccttcccagtctctactgtctatcgctccatgctct

SEQ ID NO: 922 - DNA, 201 bp, Homo sapiens
aatgagggtttagtgtcacggagtctcctgcctcattctcaccctaacttttcctttacccctttgcgaggggaaggatgtccattaggttaataatgcasacccctaacccactcattatcagggtcattgtttttccactgtgcattttaatactaactgttacctgcactgctccctgcccctcaaagtgcagaaagc

SEQ ID NO: 923 - DNA, 201 bp, Homo sapiens
gtctttataaatcaacacatacttaatgagcctctattatttatgaggttagcgctcaagtgtaagatttgcagaaaatgaatccaaataattgtgtctcrtttccagataagaatttttaagaaaacacaagggaacatctctctcaagttcacttgagggtaatttttacatcagtgattctcaaccagcagtgatttt

SEQ ID NO: 924 - DNA, 201 bp, Homo sapiens
tccagcaagttcaatcaatgacatggagaaaaggtaaaagttggtatttcattattggagaagctgtttttcaaaactgaatcagttttgtgcagaaaggygtagtataactgagagttcttcctcacacggggttcaaggaccagcttcagcaaaatcccgtcaagtggttcttacaaatgcagattcctaggccacaac

SEQ ID NO: 925 - DNA, 201 bp, Homo sapiens
cctaatgtgctgggattacaggcatgagccaccgcacccagcggtaattacaatttttattaggtcagagagatgcttattaatcacgagccacagtttcwtcttaatgatttttccttttgattaatatccagagtaagcttttctttgttgttcccatttccatgttcataactctttactcatcttcactctatgtga

SEQ ID NO: 926 - DNA, 201 bp, Homo sapiens
gctgcccaggcttgaaggtgagatgacaccggtaatgtgaaattgtccttcctatacacttctatgtgtcttttcttatttctgtgctgcaaccaggtggyataacctctcacctgattccttagctctagtgaagttattttcgtgcatggatacttgttcgaattgatgtttctgcaagggatgagcgctagaaactcc

SEQ ID NO: 927 - DNA, 201 bp, Homo sapiens
gcaaccaggtggcataacctctcacctgattccttagctctagtgaagttattttcgtgcatggatacttgttcgaattgatgtttctgcaagggatgagygctagaaactcctgttctgacaaactcctattcctattcttgctgacatcactccctgaaatagttaatatacttaacagctgaacacggataggatgtt

SEQ ID NO: 928 - DNA, 201 bp, Homo sapiens; identical to SEQ ID NO: 778

SEQ ID NO: 929 - DNA, 201 bp, Homo sapiens
cactctctctctcgtatcaccttgtgaagaaggtgtctgcttcccctctgccttccatcgtgattataagtttcctgaggcctccccagccatgggtaacygtgagtcagttaaacctcttttgtttataaattacccagtctcaggtagtatctttacagcagtgtgaaactggactaatacatctgggaaattcttttt

SEQ ID NO: 930 - DNA, 201 bp, Homo sapiens
tcagtttactttcagattccatatatagttttaaaatacatgttttagctgaatagtaaaaaaaaaaaaaaatatgtaggcacaggagtatctattgggcwctcctgggaaggagagtagcctttctttctctttctttctctttctttctctttctttccttctttctttccttccttccttccttccttctttccttgc

SEQ ID NO: 931 - DNA, 201 bp, Homo sapiens
tgaaactcagattcctatataaaaatgttgggataactttgttccttcagtaagggtcatacagacattatagatcttatcgggaagaaaaattatcacartatttagacatgactgtcttattttaaaaatgttttcagtttactttcagattccatatatagttttaaaatacatgttttagctgaatagtaaaaaaaa

SEQ ID NO: 932 - DNA, 201 bp, Homo sapiens
aactcactgcaatttaacaagaaagcaagtacacagatgagccatccagggtgctctcccaggtgtggacagcagctgtgacagcccagagccacagcacsagcttgcctgttccctgggtaagtgcagcaaatccttccagcaacagggctgggtacagaatggagcatgtttgcatcgagtcctgcctcctggcagcct

SEQ ID NO: 933 - DNA, 201 bp, Homo sapiens; identical to SEQ ID NO: 210

SEQ ID NO: 934 - DNA, 201 bp, Homo sapiens
gaagctaccacttgttgcatgcttactgcatgtcaggcattctatctagcattttgcatgcatgatctcatttcatttctcaaagtaactgtattacatgyattttactattgtcttccctttaaaccattttaaagatgaaaatacagtcagtcagtgaagctgggttacctacccaaggcactcggccaggtgtcagtt

SEQ ID NO: 935 - DNA, 201 bp, Homo sapiens
agatcacgactttagatcacctgcttactgaaatagtacttctagcattttaactaaaaaccattaccattaatgagtgatatgttactttctaatttatkttcataatgtaggccataggaaaaagaaaacagattgatttgcagtttaggaggcccagtctgctctttttatctgtctttaaccagctgtgggaagtgg

SEQ ID NO: 936 - DNA, 201 bp, Homo sapiens
tcagcttaaagggaaaaatctagttacacctggtatcccctcagcagtacagcttgacaaacatttatgaagcatcattagcccaagcatgggaatactayggttataaaaatacataagacacaggcactccaccttctcttaatattggtttgtctactttcatttgggctgggttcagaacttatagatcttaaaaag

SEQ ID NO: 937 - DNA, 201 bp, Homo sapiens
atacgttaatttactaccaacttgagttttagggctatgaaatatgaatgactagctcaggctgctatttatcttaataattccaaagaagagggaaatayggcaacatgttccaaaagttagaaacctgctatttgatgcagaaaaacttactgaattcatcgctgtaggctgtggacggtcagaagccccaggatgtcg

SEQ ID NO: 938 - DNA, 201 bp, Homo sapiens
atatttattataaaaatcttattttacctccagatacaagcactccatcagaatttaccgtcaatgtgttaataatagcattatgaccggaaagattttgwatgaaacttccatcagggaatttccactgctttatgttatctggagaaccagatgcaaatgtgtaactgaaataatattaaaaagaattaacgacaaagt

SEQ ID NO: 939 - DNA, 201 bp, Homo sapiens
gaaataatattttcaaagtaattaatgcctccagtcatgtattctgcaaaactaaccctttattttaaattgttataaagtcctgataaaggaaaatgtcrtataatagttataaagaaattttaaaaagaaaaaatgtgaacagtgaaatatgcttttaagatctttgtaattataatatttcatacttggtctgcaaag

SEQ ID NO: 940 - DNA, 201 bp, Homo sapiens
tggcttcctgtaatggaaacacatatatccctcaaaacatagaccaggaaaaataatgcaaaagttaaataaaatacaaagcattcttccaaaacacataygttctaaatgaaagtcatatcacacgcaaattagtcttggctaatttcttcatagttccaaatttttaggttgattttaattctttaaaaaaatgcaata

SEQ ID NO: 941 - DNA, 201 bp, Homo sapiens
gcccctccccatcccatacctcatccccagcatctacccccagaaagaggcaatattgaacccccaagtttgttttgagtattcaaaagtatggaaaaccygtgccccaattcctgtatagcgctctaggagagcggtttcagagtggacagtgtgataccataaacagtagagaaaaatagctgcttctcagatttcaga

SEQ ID NO: 942 - DNA, 201 bp, Homo sapiens
acagtagagaaaaatagctgcttctcagatttcagacataaggaagaacatgcttggatgtctaggtgtgtgtgtgaaggatgagggccccagaaatattwtcgtaagtttaaattctgacctgactgtatttcaaaccagaagcgactgagttttgttgaactggcaaggttgtttttctaccactgggccaaaataggg

SEQ ID NO: 943 - DNA, 201 bp, Homo sapiens
ggtttctaacttccagacaaagatgccattatactgcaatgacttctcagagaatgtgaacaaaactcctttaaatgttcgactagctcttgtaatcaccrtcaacaacatttaaaccttgggtagggagtagtcagcatgaaatgacatttcctctctaactcacctaatacgatgcctggcacacagtaggtgctcatt

SEQ ID NO: 944 - DNA, 201 bp, Homo sapiens
ggagaggccaccagagagcccagtgactaagaggcttttgcaaatcttgaggggctagatcgctggaatttccagaaattctagtcagcacaatttaatgytgtctgcagcaatacttggcaacctggaaaggtttgttgcaattgttggaggtgcagtcctacatgtaagccaagctgagctcaccataatggatctacc

SEQ ID NO: 945 - DNA, 201 bp, Homo sapiens
ctttcctctgttgactgccaattccttatttcccataactctttgtatctcagtgcaaaaaaaaaaaaaaaaaaaaaggagagaaagaaaaatggaggaawgatattgcagaagcttctagcctcaaaggatgcattcaattaataaacagtaatctttcaggaaagcaaccctaaatcccctggtcaacaatgtccattc

SEQ ID NO: 946 - DNA, 201 bp, Homo sapiens
tgtattgtaaacattgcatgaattctaaatcccaaagaccaatgcacagaacaatttcattttgcttttcaagatagcaaaaagactgagaataagtctcrctcacccatatgaatttcctatgcaggcattattcccgggttatctagagttgaattgttaatgctatttaattttaatagccttctcaattttaaatcc

SEQ ID NO: 947 - DNA, 201 bp, Homo sapiens
caactatgtttttaatggtcattaaatgaagtctcaaaagtgaagatatccaatcaagtccaatccctggaacaatgtagaaaagatggacctaagaaacyaaaattgaaatgtctttttcatggatttagtgcagattccctttaagaaattgataaatttcactgtggactggttgctaggatacccctcaaaatctat

SEQ ID NO: 948 - DNA, 201 bp, Homo sapiens
gtggggcagggggagatatagttggagagatctactgttggtaatatgtatacatgtatggaagaggaagggttagtttggtgcatagaagaattacaacygaacagagaaggaactaaagcaaggaggggggtgatatacaagaagagaaaagaaagagcaagtcatctagaaaaaaatctagattaaaaaataaatgca

SEQ ID NO: 949 - DNA, 201 bp, Homo sapiens
caactggaagaacgggcctgcggggtccttgggcaggtcggacggttgcaccagggtgtagccctgagtgctgaacagtccggcgtccggatcgtgggcamctggcaggcggaaggcggtccctggcgggctgagctcggagacgtcgagttgcagggagtcgaggggaaagcggggcgagtggtcattcacgtcgttgac

SEQ ID NO: 950 - DNA, 201 bp, Homo sapiens; identical to SEQ ID NO: 820

SEQ ID NO: 951 - DNA, 201 bp, Homo sapiens
ttccaagcaaatggtttcctgtggaatcttgaattctctttacttattaagatttcagtatttaatttcatctttctgaattacagacaagatagatggtrtcctcacaggttaagaatattctccaattttttcctttaatctctactgtgaccttctccacactctaagaatctctgccatcattatactaccattttt

SEQ ID NO: 952 - DNA, 201 bp, Homo sapiens
agttccttctatttatcttctaatacaatatttaaatactattttaacaggtatactgcctgatataccatctgttgttagcagtcatctagtcatccaawacataaataagcccataaagttcctgccctcaagaagcttaaattataccctcataaggagggtagagagcctggacagaagacgtgctctgaatggaat

SEQ ID NO: 953 - DNA, 201 bp, Homo sapiens
gaatataaataggagacaacttgcaagaattctaaaaagctaaaagatcagggtactgaaaatctaagaatgagtatgatgggactactttttaagactaytgaatgaaagaactaatggacaatagttgttacagaatggaacgtgagaatatcacatttcaggggcagggcactaataacactaacatggtgaggccat

SEQ ID NO: 954 - DNA, 201 bp, Homo sapiens
aaacaaactttctgaaagtcccacacaacatttctgattaaatctcactggctaggacttgccttcatagccacacataactgaataaaagtctgagaaawgtagcattttatgtggatgcatcccctacaccttccccactgacccctgccaaaaaataaaaataaaataaaataaagtgaaagaggagaatgcttattg

SEQ ID NO: 955 - DNA, 201 bp, Homo sapiens
cattctgaccccagtgaaagtggactctggtactttcatttagtcacaggctcgctcagggagtcttgtttcttattcctcactaatagtcccagtcatayaagcacttgagattattttggctccatcctacttccctgtagctactatggcctcccactctctcatggacattcatcgtattttgctcttgcaacattc

SEQ ID NO: 956 - DNA, 201 bp, Homo sapiens
acgttttgcatatagttacacaggtttcccaactgaaataactaagagaaataaaaacagagaaaaacctgcctctgtgctggaaggagggaagggtgacmtgtcaataagtgtttgttgaatgagtgaatgaatcatgcaaaattctaatatcttattaaaataggagataacctgccatagctaggacccagaaataaa

SEQ ID NO: 957 - DNA, 201 bp, Homo sapiens
aaatgaactggcaaaatctgtaatgttacaaagtaataaaatgtaaaactaaaactatggcacatctgaaaatcaagaatgacttgtttggcccacattayaattcctgtatactagaataataatatatgttatgtcataatttttcataaatgatttttcaaaattcagcaataattttaaataaatgtgtgcatatat

SEQ ID NO: 958 - DNA, 201 bp, Homo sapiens
ctcaaatccaagtctctcttaaaagatgttgaacagaaagtacttaaaggaatatcttacatttttcatccatagttcaagttaaatgatagggtaatacyaacacattagctgtcctttatacatattaatcaataatgcagttttattatcaataattgatttaagtctcagtagtggacaattttaaaacagtctaaa

SEQ ID NO: 959 - DNA, 201 bp, Homo sapiens
gttaatgagtgtagacctcagagatttaaaatgaactatctgcaaatctgtgacattacactagaataaatgttttattaccccctcaaatccaagtctcwcttaaaagatgttgaacagaaagtacttaaaggaatatcttacatttttcatccatagttcaagttaaatgatagggtaatactaacacattagctgtcc

SEQ ID NO: 960 - DNA, 201 bp, Homo sapiens
ttttttataagtcagtgttaatgagtgtagacctcagagatttaaaatgaactatctgcaaatctgtgacattacactagaataaatgttttattaccccytcaaatccaagtctctcttaaaagatgttgaacagaaagtacttaaaggaatatcttacatttttcatccatagttcaagttaaatgatagggtaatact

SEQ ID NO: 961 - DNA, 201 bp, Homo sapiens
tagagcttcatgccctggtaagctcttcaggctagatatatttactcaagttatttcagagtaaataaatcagtcttggaactttgattatctcccatcarataagaaataggaaattggccaggcaaggtggcttatgcctgtaatcccagcactttgggaggctgaggcgggagtatcatttgagcccaggagttcgag

SEQ ID NO: 962 - DNA, 201 bp, Homo sapiens; identical to SEQ ID NO: 821

SEQ ID NO: 963 - DNA, 201 bp, Homo sapiens
tgtaatagatattcaataagtatttgttggttagatgttgttgaattcaatcaatgttattgaattaatgaatgttgttgtttggataaataaatgaattratgaatgaacatagtacttgtatttgagggagtatgaaagaatactcttcatgttaccacatgtaattcaggtctcaatgctggagttatacttagtaca

SEQ ID NO: 964 - DNA, 201 bp, Homo sapiens
ataagtatttgttggttagatgttgttgaattcaatcaatgttattgaattaatgaatgttgttgtttggataaataaatgaattgatgaatgaacatagkacttgtatttgagggagtatgaaagaatactcttcatgttaccacatgtaattcaggtctcaatgctggagttatacttagtacagactaagatctggtt

SEQ ID NO: 965 - DNA, 201 bp, Homo sapiens
tagaaatccatggaagaaactatcagtgggcactggcatacccgggctcctctacatttctcagcctcctttgcagtacatctgacgctgcatggctgggmtctggctaatgtgacattggcggaagttgtgtaagtcactctcaggcctggctctctcagacggaggagaaacagccaagttgcttcacatcagactctg

SEQ ID NO: 966 - DNA, 201 bp, Homo sapiens
tgccattcctgtgagctcatcatcatgcccctggcagaaaagctacaagtttcttcttgtgactttcctatgaatgccttcctcgcgttgttgcctatacrtggaccgttgctcattcaacaaaagccaacttctcaccattccttcgccttctctcctgccctgagactttgatgagctcccatctgaattgccatggat

SEQ ID NO: 967 - DNA, 201 bp, Homo sapiens
atgctggagttatacttagtacagactaagatctggttataagataaaagctgcaaatgcagctcacaacatcagacttagtgtagggtggaggatggagmtcttgtctagaggttgaagttaatctttttgacagttatctgagcgaaaatggaatctttcaggccaaacatgagaactggaggaaaatctctgggtgtc

SEQ ID NO: 968 - DNA, 201 bp, Homo sapiens
gcagctagaggttatctatctcagtttgctaatggttcttgtcctctgcattaattccctcagttctgcctcactcataagtctttggaaaggtctcgtcwgggcatgagaatataagagttcagccaacactcggagaggggagggtggccagcaccatagtgccagcaacagcagcaactagagtggtaggaccccaaa

SEQ ID NO: 969 - DNA, 201 bp, Homo sapiens
tgccagcaacagcagcaactagagtggtaggaccccaaacattggggatgtggagtaaccactaagacaacttgaagttaaagggtttgtttttatcagaygacatggtattatcttacaggaaatctaggcaagattttgtttttcctgtatttccttttgtttttgtttgattttgacaaaggcaacttgagcagatat

SEQ ID NO: 970 - DNA, 201 bp, Homo sapiens
tatcttacaggaaatctaggcaagattttgtttttcctgtatttccttttgtttttgtttgattttgacaaaggcaacttgagcagatataagctgtaaargaggaaaacttgtagatggcaacagaaagaaggtacagttacaaggaatgtatgtaatgtcattaagcaaagccatggaacacaggaggtgtcatgagat

SEQ ID NO: 971 - DNA, 201 bp, Homo sapiens
atggagttgtaacaatgggataaactcacacctcatagaagaatcatctcacgatgatagaaacaactctaaagacaggctttcatcaaaaaaatcataaytaatccaccctgcttattttcctaacaatggagccaagttgtactattcataccaagatcttcagggagttccaggtggaaggaatattggaagtcaact

SEQ ID NO: 972 - DNA, 201 bp, Homo sapiens
gttgtgtaagtcactctcaggcctggctctctcagacggaggagaaacagccaagttgcttcacatcagactctgcttgagagagaaatatactttgacartgttagtcactaatatttgtggatttgtccatttcatcagcaagcattaattcatatcaagccactttttaataatctagcaactcagagctggcaatca

SEQ ID NO: 973 - DNA, 201 bp, Homo sapiens
gagacccatctcaggaaaataaaaaaagtatgatgggagcagtgcctacttcacagaattggtctgaggattacatgagacaaaggaagatctcacaacartgcatggcaaataataaaagctcaacatatgatggttatcaccattatcatcattatagcattatatttgaccttgtaactaatgtgttttctttattcc

SEQ ID NO: 974 - DNA, 201 bp, Homo sapiens
gtagggaggtgggacggtgggggagggatttaaaaaaaatctatcccacatctcccctgaacaccatctctccctcactccccaaaaaagttgacaaaagrgttttattcttcccatgtagctgtctgaggaattgaccatatctgggtggggtatggaatgtgggcatccctaggttcctggaagcagctcttatgctac

SEQ ID NO: 975 - DNA, 201 bp, Homo sapiens
tttcctgcagtgagaacagtagaattttattctgggatactctctgaccaagccgacgtcacaggtgggctgcagtgcctctggctgccttcccacctcaytggcttggcatcctcagcaaagtgaagtcttcatctttgtgatgggaatgggacagtctcccttgtggacaccaagagagggagaggtgcccttggctca

SEQ ID NO: 976 - DNA, 201 bp, Homo sapiens
ttaataaaatacatcaggcaaaggaattattttctagtattaaagatccattgttactaactttatttagagcaaagtaagattcaaatcagttctaaagrttactagtctcaagatgttttgtcttctaacttcaatttcttagaaaaataattttgacactataaaataataattgttcataacacagtattctagtca

SEQ ID NO: 977 - DNA, 201 bp, Homo sapiens
tatgaaattgagagaaattatgagcagctggaacattaagggcacattgtcagagggagttttcattgccaatttggaatgaagttccagcatagtccagygccatgatttaaacacataagatcctagatgccccaatctagttaatttgagcatatgtaatatccaatccttggattatttgattgacagagccattaa

SEQ ID NO: 978 - DNA, 201 bp, Homo sapiens
ccaatcttaggttctacaaacagtgctgttatctataggaggaattggagaagttacaaaccttgtgacctctagaacaatggtcagttattaattacacytatgtcttctcagaattcaggcccctatctcatggtcctaaccttgtggcttttctttagttttacaaaggcagtttagtattcggaaggattattatca

SEQ ID NO: 979 - DNA, 201 bp, Homo sapiens
gccccaattcctgtatagcgctctaggagagcggtttcagagtggacagtgtgataccataaacagtagagaaaaatagctgcttctcagatttcagacayaaggaagaacatgcttggatgtctaggtgtgtgtgtgaaggatgagggccccagaaatattttcgtaagtttaaattctgacctgactgtatttcaaacc

SEQ ID NO: 980 - DNA, 201 bp, Homo sapiens
tgtgctaataattagccatctcccacattcttgatcacatgtaaacagtagaccaggcatggtggagagagcagctaattaatatcattcagatggaaggrctttcattttctgcctgcttttgggaaattattccctggaagaatttctttgtatggagatattggacaatctcctatgtccatcctgtggacaatagga

SEQ ID NO: 981 - DNA, 201 bp, Homo sapiens
ccgcgtccgtggccaccagtagtaactcatacagatcgcggctctctctgtccaggggcccctccacgcaaaggaaaaatacccctggggggccgccgggyagcaacgcgaagtctccctctccgccttccaaggacagagagatgctcccgtctccaagacccacaccaagctcccctgtggcctcatcttccttctccc

SEQ ID NO: 982 - DNA, 201 bp, Homo sapiens
attggtacctagaatgcatgtggtaaattgtatttttcttgccctctggtgtttgtatgatgaaatgttttaggagtgaattattttggaattctcagtartatcaaactccgacttcttagccccccagaaggtgtgaagggggaggatataaaattcccactatctggctggatgcagtggctcatgcctgtaatccca

SEQ ID NO: 983 - DNA, 201 bp, Homo sapiens
ttggagttggaaccctggagatgccgaaggaaacccgtcttccctaccgccccctaacgcaccggcctgcttggaacgcagttggaggctgcgcggtaccrgtcccatgggggcttctgctccgggtcctccagtctcagtggtcgctgctgagccggctccctctgacttttttttttagacggagtctcgctctgtcgt

SEQ ID NO: 984 - DNA, 201 bp, Homo sapiens
caatgactttgcttgtgtacacttgtcagatcattcccattaggcagtttcctaggaatgaacttagtaggccaaaaggttcaaagtttcaataaatcccrgaaaactacattcctaaaggctgtgacaattatactcccacctatggcatacaagatgggtaatgtaattggaagtgcttgttcaaaatcatggtgcaat

SEQ ID NO: 985 - DNA, 201 bp, Homo sapiens
atgcctttgatacaacgttaagtgaaaaaagcaagatacaaaattacatactaagaatgattttttaaaagatacacacacaggaaaagagcttagaagtraaggtattgatacttacagaaataaatactaaaacgaaacttatccaaatatctaacaatggtaggattatatacaggtctatgtactttcctaattctc

SEQ ID NO: 986 - DNA, 201 bp, Homo sapiens
cacattttgattggtccacacaatcaaaccagaagaatgttccagtttattgaatttgtctccttatttaagaaaaagaaaattaagccaggagaagttarcgctccatccaccagctgggtctttgatgaagggaagtgaaatgaggattctgcacaggtgggcggtagctggtggagtgagcgccctgcaggtgcaagt

SEQ ID NO: 987 - DNA, 201 bp, Homo sapiens
agaactaattcagcagctcaggatagaaaggagagcaaagaacctgtgacaccataaaaaacttcagcagcagtaaccaaccatgatggcaattaacatawccagcaaaataatagctaatattcgtagagtgtttactatttggtaggccctgcaatgactttactctttaataggcacaacaactcgatgagactagaa

SEQ ID NO: 988 - DNA, 201 bp, Homo sapiens; identical to SEQ ID NO: 825

SEQ ID NO: 989 - DNA, 201 bp, Homo sapiens
tatgactcttaggtatcaatatttctatttgatatgttaattagctaacaaattattctcaaggaaagaaagacagaaattctccatgagaattctgattytcagctttgtaaattctcctaaagaagtttcaggagaaacttcctctgaccaagttaagaaagaagagccgtatttaatcaaagtatctatctactgctg

SEQ ID NO: 990 - DNA, 201 bp, Homo sapiens
ttttgcatttgggcctgagagaagaattaatttcctagataccgtttctctcctttagggaggaccaaaagccctgcatagtggtttcttgcagcaacaayaaaatgcctttttaaatgtgcaacggaggtgtatgtaattgctaatccacagccacaccgttatctctacctgtgaccaaataacaataaaataattgac

SEQ ID NO: 991 - DNA, 201 bp, Homo sapiens
ttcctagataccgtttctctcctttagggaggaccaaaagccctgcatagtggtttcttgcagcaacaacaaaatgcctttttaaatgtgcaacggaggtrtatgtaattgctaatccacagccacaccgttatctctacctgtgaccaaataacaataaaataattgactttgtagcatatatgttaccgaaaatgggga

SEQ ID NO: 992 - DNA, 201 bp, Homo sapiens
accgtttctctcctttagggaggaccaaaagccctgcatagtggtttcttgcagcaacaacaaaatgcctttttaaatgtgcaacggaggtgtatgtaatkgctaatccacagccacaccgttatctctacctgtgaccaaataacaataaaataattgactttgtagcatatatgttaccgaaaatggggacattattaa

SEQ ID NO: 993 - DNA, 201 bp, Homo sapiens
aaccagcctggggcctgacctcttctgctctcagcccctttctctgcatatagaaagtctaaatgcagtatgtgtagacttttaaagttttaaaattcagyctcaggaagaaaatcagaaatactggctggtgaaataaacagtttaggcatcttgtaagcctgccttttttgaaaaacaacaaaacaaagtaagtgttgg

SEQ ID NO: 994 - DNA, 201 bp, Homo sapiens
atttttttcacaacttcttgacactaacagatgagaaagaaggccacttttgctcaagaaccaaaacagagtactgagtccatcgtcaagagatatcagamattgaaaaagatagcagcacaggtttccagaactcttctttgagtaggaaagacttggggaaaaaaatgggccaataggtagcagacatcaactcctaca

SEQ ID NO: 995 - DNA, 201 bp, Homo sapiens
tgtctagttggatctattaactttttacatatttaatcatcctggagacattaatttaatttctcaataacaacatggtaatgattgaggtaaattgcctygaatttgctccttttaaaacactgtcgtgaatttatagaatgatgtcatccccttgaaagtttacaatattttagataaatatagaactcaagtgaccct

SEQ ID NO: 996 - DNA, 201 bp, Homo sapiens
tttaaagctgtctcaaatcatattacctcctgcttagaacctgaaatgattccattatacttagattataattcagactccttcaatcaagctccttttartagtacaggatcctatccatctttctgaccttgcctcataccaccactctggactcagccatctgccttctttttgatcttgtacctttgaattgttaga

SEQ ID NO: 997 - DNA, 201 bp, Homo sapiens
attattacaacctcaaaaccttcattctgctttatctcagcacctagaacagtacctagcatgtagtgtgtctctatttactaagtatgtgttggacagayggttggttgaacctatgggtaagtgaatgcatttgtctgttaaagtagaagttggaagccataaccaagaatgaattggccatgagaatcttcactgtaa

SEQ ID NO: 998 - DNA, 201 bp, Homo sapiens
tcaattaactataataatcggtagaaactgatcaatggcctctaataaagtacgcctgagaaaagactctctggactcttaaaaatggctgaccatatttrgcaagtggtttctgcaattttgcatttgggcctgagagaagaattaatttcctagataccgtttctctcctttagggaggaccaaaagccctgcatagtg

SEQ ID NO: 999 - DNA, 201 bp, Homo sapiens
ggtgacgaggagcctggcaaaagcggtgacggtagtggccccggagtccggtagcgcaactggaagaacgggcctgcggggtccttgggcaggtcggacgrttgcaccagggtgtagccctgagtgctgaacagtccggcgtccggatcgtgggcaactggcaggcggaaggcggtccctggcgggctgagctcggagacg

SEQ ID NO: 1000 - DNA, 201 bp, Homo sapiens; identical to SEQ ID NO: 828

SEQ ID NO: 1001 - DNA, 201 bp, Homo sapiens
ttacatataaagatgaagatgattatataaaatataaattatattaaaaataaacatacagtaaattatgcataatatatagatatgccatccaaggcatytatgttattttctccttgaatgatcaacatgacattcaccagaaactggatatgtctagagacatcttgatttgcacctaaaacatgaagagccgcttta

SEQ ID NO: 1002 - DNA, 201 bp, Homo sapiens
atctaaagatgagcagtctagacttggaatagcagcactgtattcataatgacctcaggctgcttctgtatccctgctacattatcctaatgctggcttcyattttcaggatcacctcttgtcctaagatggtgggacaagctgtcacatttatatgctccagctatcacatttgctttcctgacaggagaaagggtgaat

SEQ ID NO: 1003 - DNA, 201 bp, Homo sapiens
gtggggtatggaatgtgggcatccctaggttcctggaagcagctcttatgctactcatagagatgggactgattttattttttatagcgcttaattcaccrttatgggaaatgcttccaatcacaaaaattcagcccagctcgttttgaggaagaggcaggacatgttatagttttatacaactcatttccattaaactga

SEQ ID NO: 1004 - DNA, 201 bp, Homo sapiens
aataccagccccaatataccactttctctcctaaacttcctttctttcactgagtccagtggactatatttttgatttaaattttttctccatctctccarcatttcttgaatctggataatcaggtcttgtttaaatgattggaattgctttttgacaagccagcctacctccaatacctaaacatgttccatccctcca

SEQ ID NO: 1005 - DNA, 201 bp, Homo sapiens
aaaaatagataaagggagtaagatttagtgtttggtagcactagtttggttagctagtttggtagcactagtttggctagttagcttggtagcacaatagrgtgactacagttaagagtaatttattgtatatttcaaaataactagaagagtaaaattggaatgttcctaatacaaagaaataatatcccaattaccgtg

SEQ ID NO: 1006 - DNA, 201 bp, Homo sapiens
ttgcagagagacactcatgcatgaatgtccagactacataaccggtggccccaactcctgccactttggcaagcagtacacctccatgtggaggacatacrtcatgatggtcaatgccactaaccagatgggaagcagtttctcggatgaactttatgtggacgtgacttacataggtaaggggaaggaaagtgggtgagg

SEQ ID NO: 1007 - DNA, 201 bp, Homo sapiens
tgaaaaacagggacaacgttcctccctcagccagccactatggggctaaaatgagaccacatctgtcaagggttttgccctcacctccctccctgctggayggcatccttggtgggcagaggtgggcttcgggcagaacaagccgtgctgagctaggaccaggagtgctagtgccactgtttgtctatggagagggaggcc

SEQ ID NO: 1008 - DNA, 201 bp, Homo sapiens
caacgttcctccctcagccagccactatggggctaaaatgagaccacatctgtcaagggttttgccctcacctccctccctgctggacggcatccttggtrggcagaggtgggcttcgggcagaacaagccgtgctgagctaggaccaggagtgctagtgccactgtttgtctatggagagggaggcctcagtgctgaggg

SEQ ID NO: 1009 - DNA, 201 bp, Homo sapiens
gtttgtctatggagagggaggcctcagtgctgagggccaagcaaatatttgtggttatggattaactcgaactccaggctgtcatggcggcaggacggcgwacttgcagtatctccacgacccgcccctgtgagtccccctccaggcaggtctatgaggggtgtggagggagggctgcccccgggagaagagagctaggtg

SEQ ID NO: 1010 - DNA, 201 bp, Homo sapiens
ccccattccaggtggtcctgctggactcaaagaagaagctggcctgcggggcagtgctcatccacccctcctgggtgctgacagcggcccactgcatggaygagtccaagaagctccttgtcaggcttggtatgggctggagccaggcagaagggggctgccagaggcctgggtagggggaccaggcaggctgttcaggtt

SEQ ID NO: 1011 - DNA, 201 bp, Homo sapiens
ttagatttgacgaaatatggaatattacctgttgtgctgatcttgggcaaactataatatctctgggcaaaaatgtccccatctgaaaaacagggacaacrttcctccctcagccagccactatggggctaaaatgagaccacatctgtcaagggttttgccctcacctccctccctgctggacggcatccttggtgggca

SEQ ID NO: 1012 - DNA, 201 bp, Homo sapiens
tggagctgctttctaggcaggcagtgtgagctcagccccacgtagagcgggcagccgaggccttctgaggctatgtctctagcgaacaaggaccctcaatyccagcttccgccctgacggccagcacacagggacagccctttcattccgcttccacctgggggtgcaggcagagcagcagcgggggtaggcactgcccgg

SEQ ID NO: 1013 - DNA, 201 bp, Homo sapiens
tcagctcatcgatattgttagtgactctgcttactgtttatttattgcagaactttgagacggccttcattaagaccactctggagcccaccctgtgtgcrctttttctccgacttcagcaactgctagatcaatgtatacatcttatttttattacacacattcgggcccacagctcactgcctggcccactggcttatg

SEQ ID NO: 1014 - DNA, 201 bp, Homo sapiens
taatttttttctgtccagtactagtacataaaaagtaaaggtatctgaagccatcttttaaattttttttaaagccaagaaaatgatttggcaaaagataycgaagagcttacgttagggaaaactaaactgtatctgtctatgtgtttagaatttatcccattaaagaaactgcccagttagtctcattttctaaacgta

SEQ ID NO: 1015 - DNA, 201 bp, Homo sapiens
tctccacccactcactccctcaactgtgaagaccccaggcccaggctaccgtccacactatccagcacagcctcccctactcaaatgcacactggcctcayggctgccctgccccaacccctttcctggtctccacagccaacgggaggaggccatgattcttggggaggtccgcaggacacatgggcccctaaagccaca

SEQ ID NO: 1016 - DNA, 201 bp, Homo sapiens
ccccacaggttcctcaggtgggttctgggctaggccctgccctgctgggggctccacagggcttggcctagattggacgagtcgggtgggcagcccctggyctctccactcaggagactccccacccacagggctgcagtcctgcctcagggctcagcaagcaaacacgtaagagcactgcacagttgaaaaaatgagttt

SEQ ID NO: 1017 - DNA, 201 bp, Homo sapiens
cctaaaacaaaagtttaccaaaaaaaaaaaaaaaagaaagaaaagaaaagaaaaagaaaaaaaatttcaagacctagatcagaaatcagctccttggccargcatactggctcatgcttgagcaaggcaggaggattgcttgagcccaggaatttgagaccagcctgggcaatactgtgtgacttcatctcaaaaaaaaaa

SEQ ID NO: 1018 - DNA, 201 bp, Homo sapiens
tgcacagttgaaaaaatgagttttaaaacaatctgccaagaaaaaagatgtcaaagtagtcatcacgggaaaagtcagaattttggtggacttcactgcayttattctgtggctattaattttaaattatgtatgtgggggaggggagcacaccataatctttctagtgccctgaggctcttaaaccaggctctgttcacc

SEQ ID NO: 1019 - DNA, 201 bp, Homo sapiens
aacaatctgccaagaaaaaagatgtcaaagtagtcatcacgggaaaagtcagaattttggtggacttcactgcacttattctgtggctattaattttaaaktatgtatgtgggggaggggagcacaccataatctttctagtgccctgaggctcttaaaccaggctctgttcacctggacctgtgttcatgggcaggaaac

SEQ ID NO: 1020 - DNA, 201 bp, Homo sapiens
agagggctgggattaccggtgtgagcaaccatgctggaccctctaagtgatcttaagagatgcctgctcttgccttcccatgttagccccctaatgtaacyggctcagagatggacacagcgaatacagacagaatggggatgtgcctccaaatctgcctgactccaggaggggtccctttagttgacattggccctggag

SEQ ID NO: 1021 - DNA, 201 bp, Homo sapiens
cagtagtcaccatgctaaaattaaactagcagtgtctcaatacaaagcacaacaattaatccgcaggcaaagtggatggtcacgttcaagattatagcgcrcttaagttacatcacaaggagtgacataataatggatgatccactatggtgtactacaaatcatggtggttgtcctcagcaacagacactaaggaaggtg

SEQ ID NO: 1022 - DNA, 201 bp, Homo sapiens
ttattcacctctttccatactatactctttgcaaggaagtcactatgctcagcccacacctaaggagtggggagctatgctccacctccttgtgtgtgaartatctgcataaattactaggaattcttctgcatgtgagatctgtctcttctctcctgtttacttatgtaatcttttatttatattaatatagaattgtgg

SEQ ID NO: 1023 - DNA, 201 bp, Homo sapiens
gatcacataattccctcactcattctggatttactagcactcagagagctgagattggagccttaatattagccttagaaactttctccactcagctcatrgatattgttagtgactctgcttactgtttatttattgcagaactttgagacggccttcattaagaccactctggagcccaccctgtgtgcactttttctc

SEQ ID NO: 1024 - DNA, 201 bp, Homo sapiens
gcctccctccccttcttcctgagcccttcatgcagagcccaggacgcaatggtcacaatggctaaaatctctttggaggagggagagatcagtgcaggctraagccattggtgagagtggaagaattcagctctccagcggaaggcagcaatatgcagagagccctgtgatggggctgctggagccgaggcctgggggttc

SEQ ID NO: 1025 - DNA, 201 bp, Homo sapiens
ctgcagagaaggtacccaggccctgggctcagtggcccttccccagctggtgcccccagccttactgcctggccctcctgcaccttcttttccttgtctargaactgggctcatccccctctatccccagtggttgtggggatgaaaggaaggccaacccctgcaaggcctggtgcctggagctggccctgggtagacgcc

SEQ ID NO: 1026 - DNA, 201 bp, Homo sapiens
cataatatcatagtagctctgttttcttgattgagcccttaaatgattcaagtactcaagcttcctcccaatctactgaccaagaaatctctgcagctttscctctgagatcttcttgcatatataacaaaatctacatcatttggtctccaatttgactgcttccaaacaaaccttgttttatcagttctgcactgtcct

SEQ ID NO: 1027 - DNA, 201 bp, Homo sapiens
ccactctggaggagaatgagggctcttctggtagttctttccttaaagaacaggagcacgtttcttccccagaagtctccaaacttatcctcatatttcaytgggctgaatttgattacaaacccattcctgaagtaaaccttgggccaggaaatgccatgcacaagttggcaaatgcaatgggatcactctctgaaaaat

SEQ ID NO: 1028 - DNA, 201 bp, Homo sapiens
gcagtgatctctgcagacttgcgggggcgacgcctgaagcaaacagggacatacaagctggtgccttctgtggttgtgcatggggtcttcatgcttcctgyctgagttcccagaagcttgtctctgcttttctaggcagctgccacagcctgtcacaaacagctcctggttctccacttctcatagtctcgatttcaaaat

SEQ ID NO: 1029 - DNA, 201 bp, Homo sapiens
cacaagaggacttgtaggtgaattctccaataggggaatgagcacacctcaccaaacccttcgggggctggtggacagcatcgcatctcacagctggaacrcacgagagagcactttagaagtttgtttgcatctccagcaatacgtttcccaaggtaaccaagttcccaagctcttcaatagttctttttatcttaaaat

SEQ ID NO: 1030 - DNA, 201 bp, Homo sapiens
ctcccattagttcaaatccttcttcacagtcaaatgtacaggttgtgttccatgggaagcttccagggttttggaaacattccacgaacccattggctggrtttgtcacagcatcacactcaaccactgaggattttaaagagcaccatgaattttacagaagaatgatcttttcacttcctattgagctgggtgcctaac

SEQ ID NO: 1031 - DNA, 201 bp, Homo sapiens
tatgacaccatctgcaccagggaagggaaggcatgcagacctgactctaatgccagctaggacgtgagatggtgctaccatctcaagtgaagaaagaggcragaaccagacttactttgctcacacttgagtccactgaagccagggtcacacttgcaagtgtaattattgatggtctctacacattcaccgtggccactg

SEQ ID NO: 1032 - DNA, 201 bp, Homo sapiens
caagaaccagacttactttgctcacacttgagtccactgaagccagggtcacacttgcaagtgtaattattgatggtctctacacattcaccgtggccackgcaggatgtattggtacaggcagctacggaaaatacaaagcatgatgaggaggactattactgtgcttatactgagtgcctttgattttagaatcaacag

SEQ ID NO: 1033 - DNA, 201 bp, Homo sapiens
aggatgctgccagatatcctgtgcaggacagccccagacaagcaaggatatttcagtctgaaatatctatagtgcgagaatgagaaatcttggtctaatgrcactgacttacccaaagtgagagctgagagaaactgtgaagcaatcatgacttcaagagttcttttcacccaaaggtttaggcttgaaatactttcctgg

SEQ ID NO: 1034 - DNA, 201 bp, Homo sapiens
tcacacttgcaagtgtaattattgatggtctctacacattcaccgtggccactgcaggatgtattggtacaggcagctacggaaaatacaaagcatgatgrggaggactattactgtgcttatactgagtgcctttgattttagaatcaacagtgtgcaacagagacatcagcagtcctacagagtgccatagactttaac

SEQ ID NO: 1035 - DNA, 201 bp, Homo sapiens
gaacattttaccactgcaaatgttaggtacacaggcagagtttcagaaaaatctactggaaaacttccaaaacttgcttaaaagtcaacaatgaatgtaawgtgtaagcgctacttagttttcagcatgtaggaaattaggaccaaacccctttggggcaatctaggttcagaaactttatgaagtatttgacctgtaccc

SEQ ID NO: 1036 - DNA, 201 bp, Homo sapiens
tccacatgcccacatctttttctctcttgatgtagatctccacgcagtcctcatctttttgcctattgttgggttcacctggagcccagttcttggcttcytctgtcagaggtttctgggttcctacccagacccacacattgttgacttttctgattccaatccagtaataacttggtgaatagctcaatatggagttta

SEQ ID NO: 1037 - DNA, 201 bp, Homo sapiens
acatgcccacatctttttctctcttgatgtagatctccacgcagtcctcatctttttgcctattgttgggttcacctggagcccagttcttggcttcttcygtcagaggtttctgggttcctacccagacccacacattgttgacttttctgattccaatccagtaataacttggtgaatagctcaatatggagtttaggt

SEQ ID NO: 1038 - DNA, 201 bp, Homo sapiens
gtagttgttctctcttatttcccagagtttttctgcccctttaaaagaacctctgctgttctgatccttatcacatctctgttttgactgttggctttgtygttgccagtgttcagccagaacttctctgaaacttttttttcaacacatgctaagttaatggaagtgtaggagagttttgattctcacactcctcaaggc

SEQ ID NO: 1039 - DNA, 201 bp, Homo sapiens
cttccatgctcaggggattccagggctgtacagttcacaactgaaaaagaaacccaaatcagttctgctcatctctcacctttaacagataagaacactgraaactagaactacagtttggttttttttttttttagtttaaaaatttataaaatttctaatggaatttgtaaaattgactgtaattctaccccttttctt

SEQ ID NO: 1040 - DNA, 201 bp, Homo sapiens
gtttaaggcagcatcctaagattttgggcaaaggacactagtgcaataatctttatttcagagtttaatcaaataaataaacaaattttaagactttcatyatttaggtcaaagagaaaagacaggttttagctacaatacaataagagcttgtacagatgtggtttttattagaaggccttttgcatatctgtgtttcat

SEQ ID NO: 1041 - DNA, 201 bp, Homo sapiens
tatagtgcgagaatgagaaatcttggtctaatggcactgacttacccaaagtgagagctgagagaaactgtgaagcaatcatgacttcaagagttcttttmacccaaaggtttaggcttgaaatactttcctggggagataaaacacaaaatgaattaaagaaggaaatcgtgggtagctagttacattattctaccatga

SEQ ID NO: 1042 - DNA, 201 bp, Homo sapiens
tgtttgcatttatgcttttattagttcaaaacgtttggcctcatggaagtttttcatcgtggaaaccacatatttctgaaaaaatatctgacaatatacaraccttccattcagtttttactctccaattctaccatgttttcaaaaaacaactgtagtaaaaacactcagaactttattctggttaacatcatgccttgc

SEQ ID NO: 1043 - DNA, 201 bp, Homo sapiens
actgttgtggtttaactctgacaactgtgctttttattgtcttatttttggcaatgtttgtgacatggcccagacttttctcatcttttcaaaagtaagargtacgtatgaagaaacagcgacttattgtttatctcttttgtgactgccacccactaggtaccttatccacactcactcacaacattatagtatacccat

SEQ ID NO: 1044 - DNA, 201 bp, Homo sapiens
cacaaccaataccacagcccagatcctcagctctccaatgacattttcctccactagacttgagctacctccttccctaggcacagcctcaacctcgacarcacctaagactgtaccgtctctaaagtcacatgttcaaacacttcactctttaaccactgtctcctattcttgcaagtgtattgctcaagtatctcattg

SEQ ID NO: 1045 - DNA, 201 bp, Homo sapiens
aagtaataatctataattatttattacaattaaaggaaggaagagacatatggattatgagggcattaaagaggagacctagtgtaagtagccagttctcrtgaagggacatgtattagttggagttctccagagaaacagaaccaatggtgtgtgtgtgtgtgtgtgcgtgtgtgcgtgtgtgtgttggggtgtgggggt

SEQ ID NO: 1046 - DNA, 201 bp, Homo sapiens
atctcaaaattaaaaaaaaaaaaagtaaaaagaaaagataagaaatatagtaccagcccctatctcagagttcctagcttagaaaaattcccagaatatartaagtgcaatgtaagggtcagctatcttcattattattatctatcataaatgaaattacacaataaagctagatccgtttctttcctctccttctacaaa

SEQ ID NO: 1047 - DNA, 201 bp, Homo sapiens
gcagtgatgacaaccataaaaaagaaatattgagtgatatggggagagtagtgtaattgtgtttacctcaaaactgttcaaattatatgaacaaacacagyaaacttaggtaccacaacaaatttcttgttacttttctcacaactgctaaaaatactacagtaagcttccaaccaggatgagaaccattcacaaagctat

SEQ ID NO: 1048 - DNA, 201 bp, Homo sapiens
tacagtttattgaatgtgtcctgtgtgccaggcaccatgtaaccatgagcctatgaagttcacactattattatcctcattttacaatgagaaaactgacwtagagagttaaactatcttgtcaaggtgccaaaataaataactggtgaatctaggactcaaacccagcagggtctgacttcatagtctcagctcacgatc

SEQ ID NO: 1049 - DNA, 201 bp, Homo sapiens
ttagtagtgtctctcatgtagttgtggtagtaattagaatttcagaaacagaaggaaaccaagaataggtttgtcatccatagtctactaccttcaatttmtcattcatagctgtggataaccaatcactactcattttttcttcctttttcacctgccaattcaacatatttaacatgcactgtctcacagaggaatgac

SEQ ID NO: 1050 - DNA, 201 bp, Homo sapiens
ctatatatatatatttaattggtcaaaattttgtttaaaatttttgaaatgttaatgtgcaaagaataaaaattcttccacaatgttaacagtgactaacyctggatggcaggatttgggataatttttatatccttcattattattttcaggattttaaagtttttttcaatttccctttttttcacctttatagtaaca

SEQ ID NO: 1051 - DNA, 201 bp, Homo sapiens
ctactcagatttaaatctcagcagggaagtaaaccttagtttttacatgagaaaatgttacagcagccttctcggcttcctttacccccatcccagtttcrcgagcttagtgccttagatcgggttcctttagaagcagacctcgaaataaggatgtgggtgccagtcatttattgaaaagatgatcccaagaaagcctag

SEQ ID NO: 1052 - DNA, 201 bp, Homo sapiens
ttacccattgtccacttttcccaaactacatagtgttatatggtatatgacccaatcaacggtggcaaagctccagaaataccacatagacatcagggacrctttaaactaatcagcctatagtcctttttcagtaatttccaaacctggttgtgcatccaaatcacttggtaacattaaaaaaacaaaaaaatatacacg

SEQ ID NO: 1053 - DNA, 201 bp, Homo sapiens
gtgttatatggtatatgacccaatcaacggtggcaaagctccagaaataccacatagacatcagggacactttaaactaatcagcctatagtcctttttcwgtaatttccaaacctggttgtgcatccaaatcacttggtaacattaaaaaaacaaaaaaatatacacgcaacattcgctcccaatcctactgaatcagaa

SEQ ID NO: 1054 - DNA, 201 bp, Homo sapiens
ttcctggggagataaaacacaaaatgaattaaagaaggaaatcgtgggtagctagttacattattctaccatgatgtttaaggcagcatcctaagattttrggcaaaggacactagtgcaataatctttatttcagagtttaatcaaataaataaacaaattttaagactttcattatttaggtcaaagagaaaagacagg

SEQ ID NO: 1055 - DNA, 201 bp, Homo sapiens
tggactcagtgggagctaaggaagtaagagacgaagaaaggtcatgaggaagaattgatgttaaagtctctccgtcctgtccctttggccttttttctgtrcattcattactaggagcagaagagctatctagtttaatacaagaagcagagatgtggcattacaggcctttgagatctgctccaagccacctttgaagct

SEQ ID NO: 1056 - DNA, 201 bp, Homo sapiens
gcctgatcacagtagttgttctctcttatttcccagagtttttctgcccctttaaaagaacctctgctgttctgatccttatcacatctctgttttgactsttggctttgttgttgccagtgttcagccagaacttctctgaaacttttttttcaacacatgctaagttaatggaagtgtaggagagttttgattctcaca

SEQ ID NO: 1057 - DNA, 201 bp, Homo sapiens
gacatagagagttaaactatcttgtcaaggtgccaaaataaataactggtgaatctaggactcaaacccagcagggtctgacttcatagtctcagctcacratcaccatatgacaccatctgcaccagggaagggaaggcatgcagacctgactctaatgccagctaggacgtgagatggtgctaccatctcaagtgaaga

SEQ ID NO: 1058 - DNA, 201 bp, Homo sapiens
taactcaaaaatgttttaagtactcttaaacatgtaagccaaacaaaccatgagtgtagtcagatgtgcttccatattccttatgagagactctcaaattwaagcctgtactccaaataaatctccttaggaagaattttatccattttccttagagtgctcatcatggcagttccattgcacaattccgggaggcatcat

SEQ ID NO: 1059 - DNA, 201 bp, Homo sapiens
gatctctcaagatgacaatatttattctccacacagcacatacttcagggttggaaggcaggggcaatcttctcctttataatgagtgcctcttatatatstttattcatctgccctcttgtaaaacacacacacacacacacacaaagaagaaataaaataactctgcttctttgaagcttgtgacactgagataaacca

SEQ ID NO: 1060 - DNA, 201 bp, Homo sapiens
ctcctcatgcaagattggctttggcacctagttcctgatcttcctttccctgtaagcacttctcatagtcttacgggacttcaccatccatggcacaaccmataccacagcccagatcctcagctctccaatgacattttcctccactagacttgagctacctccttccctaggcacagcctcaacctcgacaacacctaa

SEQ ID NO: 1061 - DNA, 201 bp, Homo sapiens
ttcagtttcttcatctatataagaggaataatgaaattgtgttatctttatcaaattgatatggaaactaaatgtaattcaattagcataagtcaaggacsttagaacaaagcctgactcatcagaaattctaagtaaacattagctagtcttcatattattatcttcagcattatctgtagtgagaatccttaaagccaa

SEQ ID NO: 1062 - DNA, 201 bp, Homo sapiens
tgcctgcatctttgtttctcttgatatagatctccacgcagtcctccttgttcttcttgttgttgggctcaccatctccccagttctctgcttcttcagtragagatttgttggttcccacccacgtccatattcctcctatcttccggattcctatccagtagtaagaacgactgaaaggcagagtcttctccagatact

SEQ ID NO: 1063 - DNA, 201 bp, Homo sapiens
aactctatagacactgtctagctatatgaacttagacaaactaatatctctgagcttcagtttcttaaaatttaaaatgaggacaataccatctatggccrgggattaaatgctatgaggaatgtaaaccagatgtcaggtaccatctctctaaaatccagataaaatgaattaaaaatactggccgcaaaccctctctaa

SEQ ID NO: 1064 - DNA, 201 bp, Homo sapiens
tggtatttttgagatttggcctaaaacatcattgccctggtttccttatttaccaaacagggccaatggtagtgactaatcagaaaatgataatgcctggwgcacaaaatgtgtctagatgagcccatgcacaaggacacatgtttctggaactgttccttattcctttcctaaaagaaaggagggaaagtctccatacta

SEQ ID NO: 1065 - DNA, 201 bp, Homo sapiens
ttccatgatgtgccaggaaatctgcaagacatcagtgtgacctatgcagacttacataatgttacagctaaaaagaacctagcactactccaggctgagcyagacacttagagatgaggaaacagagcctaagagtgtatgtgaccatctcaggatcacagaatagttgtttgcagatttgaagtagaacctagaccttct

SEQ ID NO: 1066 - DNA, 201 bp, Homo sapiens
gtgtctgtcatcaagtacagcactgaattgaaactgaaaacaagagtcaagaaagagcaaagtcagccatctttatattccacatgaatcctttccctttrtggtcttatttgtttctcctcagaaaagacaaaaagctgagctgtataaacacctgtgggctgggggttgagggataaatgaggggcgaaatggaagctg

SEQ ID NO: 1067 - DNA, 201 bp, Homo sapiens
tatttaatatttactatgtatattttttaaagtattgttgctgcttaattaactattgatgcttatatttaatgttatagcctcactcttgatcataatgrgtcaatgcctcaaatacctaaaaaaaaaaaaaattagatagccagacaccaggaaagaaaagtatttctttttttaataaaaagaaatacctttttgagc

SEQ ID NO: 1068 - DNA, 201 bp, Homo sapiens
aaatgatgacctgacctcaatcatttctgcatgcaattatttcttggcaatccctttctttatagaaatcaaagattaaaaagtccaaatttgctaaaacrgtagagtccaatttataagagaccaaattaactatggttcattattaaaacatcacttggaaaatgctggctgttttggaattgtagaagattttacaga

SEQ ID NO: 1069 - DNA, 201 bp, Homo sapiens
tggcatagtttcttccagaccttagagttctaattaatctaacaagctcattagatcgtgagcttcttgagagcgggaatctaccatgctaattccttatkgtaaccctgacagcttttatcccaacactgtgcttcttgtggtactcaaaaagacttgttgagaagtgagtcgaaacttcatgctgacttatgaaatctt

SEQ ID NO: 1070 - DNA, 201 bp, Homo sapiens
ttggggccagccttcctttccaacttcaactccacaactcctcaataagccatgggctcaagaaagttctgctcagtggcccctgaaaaatgctttcataktctcactaccataccactgcttacacaatttccttcctacagactgccttcctttcctgcttttctccatatacctaaatcctatctattcttcataagc

SEQ ID NO: 1071 - DNA, 201 bp, Homo sapiens
acaatgtgaaaactgaggtgatgtgagcctaagtttccaactggccccagctgtcagcttctcctcccctgccttattatcaaaggcactgattgtctagytcttcctctgtacttcctacgtagatctatcattttgatgtaacttgatttaggggtatagcttttgtgcacagggacaaatcttacacaccaaaaattc

SEQ ID NO: 1072 - DNA, 201 bp, Homo sapiens
aggaaatgaaaaaccaagttcaaagctattgctggagagtcttcaagaatcagatataaaatttgtcacaacaatgggagaaggaccaaaaaatgataaasccccgtcccttaataagctcgtattgtaattgtagaaatgacattaatgtacactgaactatgaataaaaaatagaaaatgaggtgctaaatatttggta

SEQ ID NO: 1073 - DNA, 201 bp, Homo sapiens; identical to SEQ ID NO: 1044

SEQ ID NO: 1074 - DNA, 201 bp, Homo sapiens; identical to SEQ ID NO: 1052

SEQ ID NO: 1075 - DNA, 201 bp, Homo sapiens; identical to SEQ ID NO: 1053

SEQ ID NO: 1076 - DNA, 201 bp, Homo sapiens
gctgtggggagaggagtagctactccaggctgctgccctagctaaggtgaccctccccttctgctggaagtaccatgccatatggcctctgcatcaagggytcttatgggatattctcagagaatctctgccgtttcatctgttctgatatctacccaagcattttgaaaaacatcccaattcactgaagcaagtccaact

SEQ ID NO: 1077 - DNA, 201 bp, Homo sapiens
tctctcatatcactcttttctcattctttctacctgtgatcatttctcctgagatccttcatgagcacttatccaggaccataaactactataatttctcrgcttttgtcttttgtatattgctcttctgactctaatctacatgtatcctttggtcaaacttactgacttttgcggactcacaaatctatgtgatctttg

SEQ ID NO: 1078 - DNA, 201 bp, Homo sapiens
cttaactcccccaacatttatgcagggtaacattctaccaatttttacaacttagtgtttttctaatttgtcttccacttgtcaactctactaccattgcygtcattatctttcttctagattcttgcaatagtttattagatgagttccacaattttaaattagctcccctcaaatacattattcatactacagggagac

SEQ ID NO: 1079 - DNA, 201 bp, Homo sapiens
aaattcttctgattccttgagtccattcttccttgaagtctctagagcaaggtagcaataatggcttaaatttgacagatgaggaataagacatgaaagtkgtactgtttactaaatggcatggcagggtctaaaatgtgaaaactttgatttccaagtcttaaatttacctattgtaccaccaatcagaacagggaaata

SEQ ID NO: 1080 - DNA, 201 bp, Homo sapiens
tcttaaatttacctattgtaccaccaatcagaacagggaaatagatacagtttctggagagggttgtcaaaatcaaaagagttaaaattctggaactgagmtagaatagaagacagaattgaggtcaaaatgcttcctagacttttatattctctccttgcaaagaaggcttattatggagacccactctttctctgaaca

SEQ ID NO: 1081 - DNA, 201 bp, Homo sapiens
atcaaatcaccttgaaaaggttcatcaaagtaatgggaagaactaaggatagaatcagaccctctgccaatatgtaaaaaagtagattccttcaaatgttmgtatcaggagacagatttttttttataccagtattttcaaatagaggctcccaaatgaacttagtttacacttacaagagtatctctaaacatgcccttt

SEQ ID NO: 1082 - DNA, 201 bp, Homo sapiens
tacttattcgtgaaggaagtagagggaagtggtaactactgcattggaaagaaattagtgcaggtccttggcatgtaaaaatcaagtgcttatttttgcasaactgctttaaagtaaaagcattaatgatttcctttgactggtgaattatccagttcagatcattggcttttatttttcctgaagttgtattaggctttt

SEQ ID NO: 1083 - DNA, 201 bp, Homo sapiens
gcattggaaagaaattagtgcaggtccttggcatgtaaaaatcaagtgcttatttttgcacaactgctttaaagtaaaagcattaatgatttcctttgackggtgaattatccagttcagatcattggcttttatttttcctgaagttgtattaggcttttagctcttctctgtgtttcagagttccagtcattgaacaag

SEQ ID NO: 1084 - DNA, 201 bp, Homo sapiens
caggtccttggcatgtaaaaatcaagtgcttatttttgcacaactgctttaaagtaaaagcattaatgatttcctttgactggtgaattatccagttcagmtcattggcttttatttttcctgaagttgtattaggcttttagctcttctctgtgtttcagagttccagtcattgaacaagtccatggagctaaatacaac

SEQ ID NO: 1085 - DNA, 201 bp, Homo sapiens
aattgctaaccaactgctctgtgttgcctttctgtgggctcagttgattgtcattttaattttccttccatcaaattagttagtacgtattctgttcactraatatggtatgtaaaggttgccccctgtccatttacactggcaattacaaaaatattatttatcagtccctaattgcgtgccactctgatcttatctttc

SEQ ID NO: 1086 - DNA, 201 bp, Homo sapiens
tatgcaagaacttcattagctatgtataacctgagagcactgagcagttaaaatgtctctgcccttgctattagaaattctgtgctgattgaatctcactrtcttatagtattatacagtactaagtactatacagtactaagtataagtatcaagtactgcattaaggcaaaagaagaatgacagttttctccaaccact

SEQ ID NO: 1087 - DNA, 201 bp, Homo sapiens
tctttcttcctaccttgggcgatgatggcagaactgacggatagagaacagggtgggttattacacactgccccctgggataaggtggctattgtctaaayaattttaaggactttggggctgtaagtcaccttaataaggaagctatttatttccgaattctaaaatcttttaataagtgtttgtagaatcaaaagaata

SEQ ID NO: 1088 - DNA, 201 bp, Homo sapiens
caaatgttagtatcaggagacagatttttttttataccagtattttcaaatagaggctcccaaatgaacttagtttacacttacaagagtatctctaaacwtgcccttttacttattcgtgaaggaagtagagggaagtggtaactactgcattggaaagaaattagtgcaggtccttggcatgtaaaaatcaagtgctta

SEQ ID NO: 1089 - DNA, 201 bp, Homo sapiens
tttcaaacattgccaagagaaccagtaagtatcccctggatgcaacaagggtgtcagtggggagactatttgcagtgcagacatcaagacagaggtcagayggccaagcattgagcattactgaggatgagaaagtagagacagaacaagcagtcatctcttttaaaatgtttggctgtgaaggagaagtggggcaggggt

SEQ ID NO: 1090 - DNA, 201 bp, Homo sapiens; identical to SEQ ID NO: 1059

SEQ ID NO: 1091 - DNA, 201 bp, Homo sapiens; identical to SEQ ID NO: 1060

SEQ ID NO: 1092 - DNA, 201 bp, Homo sapiens
ggcggctcccgcggctccgtgcaggccccctctggggttgcctccaccacctcctgggcctccgtggcctcctcagccttcctggccttctctttcgcccrcagctcctttcgcttcctcttcttccggtcccgttcctgctttctccgccgccttttctccaaggcggcaggggacagctccttggcactgccctggggg

SEQ ID NO: 1093 - DNA, 201 bp, Homo sapiens
gcactccagcctgggcaacgagagcgaaactctgtcttaaaaaaaaaaaagagagagagagaattgctgaacgcccactaagtgccaggcaccattctggktgcggcctcattgctgaataatgcgggcagaaaccccaactccgtggagtgcctgcttggtgagaagactcccttgtagaactctgtgagggtcagagac

SEQ ID NO: 1094 - DNA, 201 bp, Homo sapiens
atgtagtaaatgtgaaataaaacaatttcaaaaagaacaaagttggaagactcatgctacccgatttcaacacttactatagagctgcagtgattaagacrgtgtggcgctggcgaaaggttcaggggaacagaacacacagtttagaaatagacctacacagatttatggccaattgatttcagatgaaggtacaagggc

SEQ ID NO: 1095 - DNA, 201 bp, Homo sapiens
gatcacagatagtaagaggaacagggagtgagcactcacatattcaactagaggacagggaccgagataaaaacagcagcaagttgtgatgggtacgtacrgtgtgttccctgccaaatccacacactgatgtcttaaccccaagcaccacagaacgtgaccttgtttggaaatggtgtcactgcaaatgttattagttaa

SEQ ID NO: 1096 - DNA, 201 bp, Homo sapiens
gtatcacaaaagcagactgaactttttagaccttacaaatgcatgactgtcccccttgcctctgatcttctgcctggggtctgcctttccccaatctttgytcactatactgaatcctacatgacacagtcaacctatgaagaaatccagagatagactctctaaaataaatggatttgggaatagcagcttatctggaat

SEQ ID NO: 1097 - DNA, 201 bp, Homo sapiens
agcctccagcaacaatggcacgttacctgctccattgcagaactggccgtggtttacatccaggaagggattggtcagtcacctgtgccaggtccccgggrgatcctgagcccagcggtataaagggtggctgtgggagtggcacaccctctcccagccccagcaagcaaaccgtcaggcggccgtggactcagatcccgg

SEQ ID NO: 1098 - DNA, 201 bp, Homo sapiens
cctcactggccccttagttcactatgatgacttcacctcttgggaacccatggggatgtctttccctccaatacatctacatttgcctgacccagaatgtrgtttcaagatgggtccatgcctggctccaaatccccttatcagagtaaggaaataccttaattcctagtttgctaaaaactcgttataaatggctgtcgc

SEQ ID NO: 1099 - DNA, 201 bp, Homo sapiens
ggagagaatcctctggagtctgaaggttggacactgggatttgtttggagaactcaccaacagaagcatgcagcgactttcttttatagcaccgcagcatsccaggaagcccagaatcatgatgatggcacctacagcaatcaatatgtccacagcaacgtaggagctagagcctacatcttcagaaccaaaaatctgaag

SEQ ID NO: 1100 - DNA, 201 bp, Homo sapiens; identical to SEQ ID NO: 224

SEQ ID NO: 1101 - DNA, 201 bp, Homo sapiens
gcttgtgacttttccatctcagacttttttctgagtctgagagatttatatccagccaggtatttccatctacttgttccacagatggctaaaaatataayctcttttctccttgcttttgcatttgtacaaccccccacccctaaaaatctcctccttttcctgtattccctatcttgatgaattatacctactctatag

SEQ ID NO: 1102 - DNA, 201 bp, Homo sapiens
atagtcctatagtctagcaatataactttaagatttacataacagaatgaaagtcagaattgtattttatggcattaaataaattaactttatttctgtcyatatcaacatccaaagtttattaggaatttatttaaagaataataaaagcaataggacctaacatttaatgagtgcttactgtgtcaaataccattctaa

SEQ ID NO: 1103 - DNA, 201 bp, Homo sapiens
tctgccactcagaaaagcaaaaagactccaagatctagggagattcagatcagtgttgagacagtcacatacacaccaccccatactcttaataaagcgcrttaatgtgaatctgtgaacatgaaaaatgccatgatgaacaatgcaaacacataatgtttgttcaaaacaggttattagactcgatgccttaccctaaat

SEQ ID NO: 1104 - DNA, 201 bp, Homo sapiens
ctacctccctaaccacatttcatggtattttgcaccatattttccctactgcagccacccctgcaccatcccaccacccagtttctattattttattacaytgaaccataagttcctaaaatataccaatctcttttctgcctcagggtatttgatcttgttgttagcgtggcctggactcctccagatcactgcactttg

SEQ ID NO: 1105 - DNA, 201 bp, Homo sapiens
ggcatttagatacaaacaggtctaatatttaagaaatgaaaagatgaatataaaaaaggtctaatatgtaagaaatgaacaggtgaatataatgaataaamagagaatctcagtaaagaaatggaaatttaaaaaaataaactgataggaggatccaagatggccaaataggaacagctccagtctatagctcccagcgtg

SEQ ID NO: 1106 - DNA, 201 bp, Homo sapiens
ggcaaggtagaagggggctgggttattaggcttttgtaacagcccagccaacagaagaaaatagtggtttagattagggtagtgggactctgtatatgcastgaagatagaaccaacataatttgctcaaaaattgaatggatagttttatgtcatgctttaaatgattattttttaaattattccaggtttattagtata

SEQ ID NO: 1107 - DNA, 201 bp, Homo sapiens
caggtttgccttaaattaccaaaatatgtacccaaatctcctttggtctatacagattttcctccttagtccacctgcctttcttttactggtaaatgcarcttttattggttgcatttatttgtaaattcagtttttctgagggctatgtaggagaagctgtaaccaatcttcaacccatttctcacagaaataagtaaa

SEQ ID NO: 1108 - DNA, 201 bp, Homo sapiens
agaagaaggaaggaaattaagattagagtgcagacaaatagagaatagaaaaacaagagagatcaaagaagtcaacagttagttctttaaaaagaaagacyaaattgacaaatctgtagccatactgactaagaaaaataaaacaggtaaaactaaaatcagaaatgaaagtggggacattattagtcaccttacataaag

SEQ ID NO: 1109 - DNA, 201 bp, Homo sapiens
tctccttttctattctctttgttgggaaattgtgtcactgcctacttagttgctgccagtagcatttggtatagttgaccactccctctttctcgaactaytctttccgaggtttatataactttatagcttacaggcttttctcttttatccaaccattttatttcactatacaatgttaggtatcctcagggcttgatt

SEQ ID NO: 1110 - DNA, 201 bp, Homo sapiens
ccagctgagaaaatggctgaaacggtaaaatattttcttttgtgatctatggaacttctaacactgtccttttactgaaaggtgacatatcatggaaagcrtttggcattaggaattaggaaatgtgggatctaaaccactcatgctattgagtgtgttatcttggagaaaattatttcctcttctgcgctttaatatttt

SEQ ID NO: 1111 - DNA, 201 bp, Homo sapiens
agttttggagacattggagttccaatccaactatagtgggaatacttcattgcttaccttggtcaaccacttacaaccctaaaaaggccatgctttggaartaagggtcatgtcctagagtaaggaccatgctctaggactaaggacaaaagcaaaataaacccatcctaacaaagcataaaacaaagtctgacaggatca

SEQ ID NO: 1112 - DNA, 201 bp, Homo sapiens
atattgaaagcctaaaaatgcacatgacctctcgcacctagttatttcctttttaatttattgtaaggaaataattatggatgtctataaaaatgtgttcrcaaaaatatgttagtattgtgttaacagaacaaattaataaatggattggttaaatcagagtaaatgaaagaataaaacgtagagctgtccctcagtatt

SEQ ID NO: 1113 - DNA, 201 bp, Homo sapiens
gcttcatcttaaatgaggtgtatgagaaacatgctaaactatggttccctatctctgcttcacaatataaaggtgattccagaatttggaagcctcaactrtaacaaactagatgaagacagaagctgattagataaactgcagtggtcaggaagcctcaccaacagagcaaacaacctccatcttcagctgcttattgag

SEQ ID NO: 1114 - DNA, 201 bp, Homo sapiens
tctttctatcctccagtccgttatccataagtgcttaaaagatatggtagttaagtgaattaactagaaccctctcaaacataggggtgaattaaaataayctataggcttatttaaaatgcaaataccgagctccattcctttcattcagaatttccaggggtgaagcccaaacagtgaattccagaagctctccaagca

SEQ ID NO: 1115 - DNA, 201 bp, Homo sapiens
taggggtgaattaaaataacctataggcttatttaaaatgcaaataccgagctccattcctttcattcagaatttccaggggtgaagcccaaacagtgaaktccagaagctctccaagcaatcccaggagaaatttctgtttaaaaaaaaaagaagaagaaagaaaagaaaagagaaaagaaaagcaagcacagacctaga

SEQ ID NO: 1116 - DNA, 201 bp, Homo sapiens
agtgtaagtgtagaaaagtttgtgactgttaagaaagttagtcgtcgggttcactaattgaactgagttgtatctagtactgagaacgatctttttttgtrgtgaaaccagttgtcatctagtgtacagtttgtcatatttatatcattgcagtagcatcaccttcttatatgttctctggtaaatctgagtctgtactgt

SEQ ID NO: 1117 - DNA, 201 bp, Homo sapiens
ttgctgtaacaaagtaccacaaactgcatggcttgaacaacaaaatgtattctctcagttctggaggctagaagtccaagatgaaaatgtcaacaaggctrtgctccttcggaaggcattagagacactctcctagcttccagtggcttgctggcagtctttggtgctccttgtcttgtagacgtaccacccttatctccg

SEQ ID NO: 1118 - DNA, 201 bp, Homo sapiens
tcctgtttccaaatgaagtctcattctgaggtagtggggggttagtacttcaacaaataaagatttgggggacacaattcaacccctaaattgctaaatayagtagtcactttttagtcctagctgatttgtcctctctaatatttaatactgttgaccattccctgccttttgagatacgttcttttgatgacttccatg

SEQ ID NO: 1119 - DNA, 201 bp, Homo sapiens
ttaaacatgtatcttttgttgacacatgattgttttgaaaattactttttctctgattttttttttgcattctttttagtgccagtaattttgaatatagrgtatagcatgtattagcattttcttggcatttcttcttggtaagtagtttctgttttgtttcctttttgttagtcaccgttacttcatccccaatccgag

SEQ ID NO: 1120 - DNA, 201 bp, Homo sapiens
tcaagtgaagccccctgaaatacggagaataagaatcttagaggtaaatccgaggacaagcaggtataactaaggatgttggaaagggacggaggtctggytggagctcggtggccagtagctttggatttagggaaagattgttccgggaagactttttcagacagggatgaaacttaggtttcgacttccccggacagc

SEQ ID NO: 1121 - DNA, 201 bp, Homo sapiens
taaatgtcaaagatgtggagaaattggaacccctatgcattgtttgtgggaatgtaaaatgttgaaaacagtgtggcagatcctcaaaatattaaacatasagttaccatatggcctagcaattctgcttctaggtagattcccaaaagaaagcagaaactagaataggtatttgtacaacagtgttcacagctgcattat

SEQ ID NO: 1122 - DNA, 201 bp, Homo sapiens
tatatcccgcacctggctcagagggtcccactcccacagagcctcactcactgctaacacagcagtctgagatcaaactgcaatgccacagcaaggctagrggagagatgtctgccattgctgaggcttaagtaggtaaacaaagcagctgggaagctccaactgggtggagctgaccacagctcaaggaggcctgcctgc

SEQ ID NO: 1123 - DNA, 201 bp, Homo sapiens
atcttgctggatattttatatgaacagtgttaatttagatgcactaaagcaaaggtaggcaaactacaaccatgagtcaaacatggccacacccattcatktgctattgtctaagctggttttgcactacaactgcagagttgaatagatgcagcagatcctttacagaaaaagttttctgacctcaattctaaagtaatt

SEQ ID NO: 1124 - DNA, 201 bp, Homo sapiens; identical to SEQ ID NO: 225

SEQ ID NO: 1125 - DNA, 201 bp, Homo sapiens
tctttacaaacacttagatgtcctaggaattcttgtcatgttcctgatttccatttttattttgtactatgaactcatttggaaacttctctttgggactygttgagattgaaattgttttcctctagaggatttatttttgcttttgccaggaacctgaggacagaactaactgggaccaccataagcttggggtctact

SEQ ID NO: 1126 - DNA, 201 bp, Homo sapiens
atatctacccccaccacaatgctatttaatactgtattaatcgttccaactaatgcaataaggaaagaaaaaaagcataaagatcagaaaagaagaaaacwgtctttctttgcagaaaacataattatttacattgaacatcctcagtaatactaaggaataactactagaactatttaataaagtcacagttatatctca

SEQ ID NO: 1127 - DNA, 201 bp, Homo sapiens
gatacagtataggcagattgtcagaagacaaagagaatcttgagaacagtgagagagaggcaactcatcctgtacaagggagccttaataagattaacagytgatttcgcatcagaaaccatggaggcctgaaaacaggaggcctgatgccacttcacacctactaggatggatataattttttttaatggaaaataacaa

SEQ ID NO: 1128 - DNA, 201 bp, Homo sapiens
acatatccaggaagctcaacaaagcccaagcaaaataaacacgaagagatacaccaagatacagtataggcagattgtcagaagacaaagagaatcttgaraacagtgagagagaggcaactcatcctgtacaagggagccttaataagattaacagttgatttcgcatcagaaaccatggaggcctgaaaacaggaggcc

SEQ ID NO: 1129 - DNA, 201 bp, Homo sapiens
attgcaggcctgttgttaagaatttcaaaggagacttttctttttgctctacccagagccaaggctgagaaggcctgggatagacctgtctccctccatgrtttctactgaggatgtcacccttaggggatcttgagtttatagtctatgatctggttaggctccaggctttgtctcctattctaccattaaaatccaggc

SEQ ID NO: 1130 - DNA, 201 bp, Homo sapiens
agactctgttgcttcaaattcaagttgcccactcttctcttcccataatctcagtgacctggttccaaagcttgtgctttgactcatttgaagactaaatktatctgtatgtcctccccacatccttttcctgggaaggaactatctcaccctcaaagtacattgactttttaaaaaattattattattattactttaaga

SEQ ID NO: 1131 - DNA, 201 bp, Homo sapiens; identical to SEQ ID NO: 226

SEQ ID NO: 1132 - DNA, 201 bp, Homo sapiens
cttataaaaataaaataaatacataaaatgtgactagcaattttaagacacttaaatatttgaattaatttattgaatacctgctctgggaattagtgttrtgtttccatttacagagacaaaacaggtctaattgattgactaaacaatagatgtaaatgtggtcagtgtttggatgtctattcatagaataggaacaat

SEQ ID NO: 1133 - DNA, 201 bp, Homo sapiens
gtattgcactagaggaactactaagacgttgaattgccacatcacaggatatatgtggttcaatttttggctgccaaacagccctccacagtacccgaacygactgtactcccaccagcagagaaggatagttactgttcctccacactccaaacaatgcttgctgtttattcagtattttattattttttccattgaatt

SEQ ID NO: 1134 - DNA, 201 bp, Homo sapiens
atcacaggatatatgtggttcaatttttggctgccaaacagccctccacagtacccgaaccgactgtactcccaccagcagagaaggatagttactgttcytccacactccaaacaatgcttgctgtttattcagtattttattattttttccattgaattagtgcaaatgacaacccattatttcaatattttaatttcc

SEQ ID NO: 1135 - DNA, 201 bp, Homo sapiens
tcaccaaacgtctcccttcactgaacaacgtcaatggttttataggcatcacttgcctgcatcttagaaattcagtattcttatattacattccccttacytgcttttttctctttatcctctggccagttctgctattaatatgtgtgtgtgtgtgtgtgtgtgtgtgtgtgtgtgtgtgtgtgtgtgtgtggtgtgtat

SEQ ID NO: 1136 - DNA, 201 bp, Homo sapiens
aagatgtgtgtgaacacaaatataccttctgtttgaggtcagcatcatagtgggtcgtgaatcatgttggccttgctgctgtctcctcatttctagggtgraaaaaaaaaagcatgaaaacaatcacttaatgttgagccccattactgatgctctctggtcctgcactagcctcctagaaaaatcaccacaggagaagcc

SEQ ID NO: 1137 - DNA, 201 bp, Homo sapiens
ttaaatatatgtaatcgtgtgtatgtatatgtatgtatacacacacacataattaaatataatcctgctatctccaagagtttctatcccaaagattatgrtttttgtttttttatccatttacccccttttacttagactctgttgcttcaaattcaagttgcccactcttctcttcccataatctcagtgacctggttc

SEQ ID NO: 1138 - DNA, 201 bp, Homo sapiens
ggaggattttctgtaaccaacttctccatcatagtgccagcaataaaatctttattttttattttaatgagattgattctaatgcttctccaataagatasctagtaaaagtgtttagtaactattccatatcaagttagtgaagctctcttctattcctcttggttaaccaagaattttaaatcatgaatgaatattgag

SEQ ID NO: 1139 - DNA, 201 bp, Homo sapiens; identical to SEQ ID NO: 227

SEQ ID NO: 1140 - DNA, 201 bp, Homo sapiens
ggaaaagttccctgcaacacctcctgaacctctttgaaacatcgatataacaaactgaatatccaactggaaattgacataaagagacatatccaaatccstcatgtaatgtttgaaataattttcctggatctgtgtaagttccaaagagtcaaactataaaaccacaggcaacactggcactacacatgcattgataag

SEQ ID NO: 1141 - DNA, 201 bp, Homo sapiens
aaaggatgctaagggaggcctcagaggcttatttaatcagttggttaatgggaaaaagtattttgtggtacacaaatacgctttaaaaatattttagttaygtcataaaagtctaaacctggggttgacaaactatggctcacaggctaactctggcccaccagctgtttttataaatgaagctttattggaacacagcca

SEQ ID NO: 1142 - DNA, 201 bp, Homo sapiens
aagagttttgctccttcctttccaatctttacaaaccttaattttttgtgtcttattggtttttctttgccattcagcataatgctgagtagtagccatgraagtagatagtctcagaagtgatgcatacagttgtgtgggttctatactgcacaattctaggagatactctttacaaacacttagatgtcctaggaattc

SEQ ID NO: 1143 - DNA, 201 bp, Homo sapiens
ccttaacaaaattatacacttttcaaaggagtttcttagtgtctagtagtcacagtgtacatagcactcataaattataaagcgtgaatagaatttcatgktctcccagagttattttattttttataaagttctacagacaggcaatcaaggtaaggaagatctttcatttctagctgctcaggagatttacgttcaaac

SEQ ID NO: 1144 - DNA, 201 bp, Homo sapiens
tggaggagaagcaggtatgattggagcaatgaggattgtaggagctgatggaaagaaagttgaataggtggagtagctccaggtaatactaaggggaaggkgtgagttgctgatatctgtgtggagatgaaggtcagtgatgttgaaggtaaggcactgggtattggaaaggtcatccacacggacactgaagacaccagg

SEQ ID NO: 1145 - DNA, 201 bp, Homo sapiens
atcagaggcaaaaatatccttcaagaaactatggacactccgcgccctattcatttccatggcagcagagtatctgcatcttgagccacctatacagattsatgcctcgtatcgctctcacctcctttctttttgaagtaaagccctttcccaagaaggcggccagaaagtggaccccaccgggggaaaaagaaaaatgaa

SEQ ID NO: 1146 - DNA, 201 bp, Homo sapiens
gtgtgcctccagggagccattaaaaactgacctctcaaccacagaaatagatgagattttgagaacattgagaagctgccttttgcaaagtaaatttgcartggtccttgacgaaggggggtcgggggcggggagaagtccagccgagagaggagctcattccacgctatatttttgcagttgaaaagctgcctaatcatc

SEQ ID NO: 1147 - DNA, 201 bp, Homo sapiens; identical to SEQ ID NO: 793

SEQ ID NO: 1148 - DNA, 201 bp, Homo sapiens
tgactctagtgatatcttcttctcgagtctggattctggtgctgctatttgctcccatttagcttatgatggctactcgcgtggcggcccacctactgccrctaactcacactgcaccattgtttctgctgccttgtggttttcattacacttctaccctgttacttttagcttctgctccactgtacctggtcgccgtct

SEQ ID NO: 1149 - DNA, 201 bp, Homo sapiens
ggctttaattgaccctcccacctaagcctccaaaagcactaggattatgggtgtgagccaccaggcccagcgacaacatgggttttaactgggtgggtccrtttacgtgcaaaatttttcaaccaaatgtggacagaaaaccaagtattcctaggatctgaaacctgcttatatagggagggccaacttctgtatatgtgg

SEQ ID NO: 1150 - DNA, 201 bp, Homo sapiens
ttctattatttttactcaagattagagacacctctttgctcatctaattttaaaatatgctattgttattgataagcagtttgatgttttaaacctttagycctgaataaccatgtggttatactttctatagttttctataaatgctgtatttacataggcaactgccattattagttgcctaagggatcatttctgcta

SEQ ID NO: 1151 - DNA, 201 bp, Homo sapiens
gttgggtttaggattttacttcttcagaatctactttacaaactaaagtgggtaggaacaaaccctttttgacttcacttccaaatgtttctggagctacwcttcttaatctccttcctcctttcctgtctcagaggaacagaagtccttcctcctcatcagttctaacttccatctgcagttttgatcccatggcttccc

SEQ ID NO: 1152 - DNA, 201 bp, Homo sapiens; identical to SEQ ID NO: 231

SEQ ID NO: 1153 - DNA, 201 bp, Homo sapiens
aagaattgctggcaacatatgcactaaacttcgttttgaaaaatccccttgatgccgatcactgagaagtgatccacaggtgagcgtctaagcattgaacrttttctattctgtgcttttttctttcgtgtgttgttgatgtcaggctgttatcaacacattctatgaaacaggaccctaggtatatgcattataacacga

SEQ ID NO: 1154 - DNA, 201 bp, Homo sapiens
ttgaggcaaagaaagttattatcttattaatatatggtccagagtcagctaaagtcagatactatggaagtgggttgacatgtgcctgggtcatcctaagmaggaaataaaatcagtactttagctcagtccattgtatcacttagccttaacatttgcaaatgattttgaaaccttgctatatttagctcttcttaatta

SEQ ID NO: 1155 - DNA, 201 bp, Homo sapiens; identical to SEQ ID NO: 232

SEQ ID NO: 1156 - DNA, 201 bp, Homo sapiens
gcccttttcagaggttgtgaagttagctccaaatcccagactagctgctaccccaagcccgggagcttctcaggtgagagaccatcggaatttgtttgtarcatttgcattatgaaagcccgctagggttttttcccccaccaaaaggtcacctacattgaacgtgatgtgctcaactaaaggagaaattctgctttattg

SEQ ID NO: 1157 - DNA, 201 bp, Homo sapiens; identical to SEQ ID NO: 233

SEQ ID NO: 1158 - DNA, 201 bp, Homo sapiens
acttgaaaggcatcaaaacaggccgctgacaatcacagtgttcctcctgtcagctttcctggtttcctgtatttcaaagatcacagatgatcagcaccctsttctcataaatgtcctgtgatgacagtcctgtgctgttggaagctcttcctggtatgtggccacgtggtcagccactcagtcaacatgcgctcccacgca

SEQ ID NO: 1159 - DNA, 201 bp, Homo sapiens
atacagtaacactatggactagccaatctggtgcttgagcagaattgaaaatagggtgattcaaattggcagaactctcggtgcctctcctaaagagacgrcttctcaggcacacgggaggacaaaaacgccactgagagactatcagccctgctccctgcttttccaggggacaaagtgaccggccatcgcccagaactg

SEQ ID NO: 1160 - DNA, 201 bp, Homo sapiens
aaaaattatagcttacacagactaaataacctccctacagtggatccaagagatagtgatagggccagaatttaaactcaacttttaaccagtactgttcygctgatgtctctgatatgtctgagtgcctaaatgtatcatgagttgtgctaagtgcaataaaaaaagataaggtgcccttaaggaattcgtatatctaat

SEQ ID NO: 1161 - DNA, 201 bp, Homo sapiens
tagcattattactttgatattcatccatgtcaccacatgtatcaatagtttactcactttgctgggtaatatttcagtacatagatgtatcacaatggacmcactcatctgtcaatgaacacagggcctgctcccagtttggggcaattacaaacaaaattgctattaacttttatgtccacgtctttgtgtagacatatg

SEQ ID NO: 1162 - DNA, 201 bp, Homo sapiens
ctgtgcacgtggtaactaattgactgatattcatatataaagtaggtactttatattgcagtttgacaaatttagtctaattccatcatcagaaagaatgrggcagtggaactcatttaatgagcttcaatataccaatatgttggctgggcatggtggctcatgcctgtaatcccagcattttggaaggtcgaggcaggc

SEQ ID NO: 1163 - DNA, 201 bp, Homo sapiens
atcttcactttcagggtgttcacaatccccttgtggccagaccatggtcccaagattaagacctcttggcccacatgaccccttgtttgcctctcgacagkagaatctgctgcctgtgaccatctctggcacagcattagcctccaatcgcccctctcccggacactgagtccacatcagcactatggataaatctgcctc

SEQ ID NO: 1164 - DNA, 201 bp, Homo sapiens
gagttgactaattaaaattttaagtgaaaatttctcccatttctttaaccattcttagtgatccagaatgtcatactggggatggcaatagcccctattcyttggcatttctaaatagcatctcatgtggattcagaaaaaggtagtcgatgatatttgttggtttgacgtctaactgtggggaagggactgggaagaata

SEQ ID NO: 1165 - DNA, 201 bp, Homo sapiens
tactgcacttattcagaagtatttacataaatgaggcaacgatgaattttttaagtctctttggctagtgtcaggtatataaaacatgtattttatgtaargaaatgaagaggttatccaacatctaaacacagtattaatttgactaatacttttagttcttttgaatatcaggatatcagaggggtaaactagtcttcc

SEQ ID NO: 1166 - DNA, 201 bp, Homo sapiens
tcagaatgctgtattttaaatatttaattttcatgtttaatcacaagcaaagtcacaaagtttttaccatgtatgattatttgtccttatacatctctgargaaaaaaatgtatagattacatctatacttaatgcatgcgttaatgaaaaaataacctctttcgcaatctttattatttacagagggagagagccataga

SEQ ID NO: 1167 - DNA, 201 bp, Homo sapiens
gagcaaatttacaagactcaggcaagctaaataacttgccccaaaacacacaactgtgagtcattatataaggatttattccaagtctatctcaatcccartcccatgctcttctgaagagaatacactgctaggaaaaatgccttaaaaatcagtaatcatctgtcaaagccataggaatgtctgttccctcttctatac

SEQ ID NO: 1168 - DNA, 201 bp, Homo sapiens
ttctttaaatatggatatatttaaaacaagaagtaaataattgagaactacagagttctattttaaacaaaacccagtgcgaactcacagctttctatggwtctccactcaagattatttacagcctgaccttagtcttcctttccaatccttcacccattctggccacattaaccacctcaactggactatataattttc

SEQ ID NO: 1169 - DNA, 201 bp, Homo sapiens
gttggtaaggactttggatttaattatagataggctccccagtagctctgcatcgactgacacctgatgtctgatgactctcaaacctgcttcttcagtcmcggcccttctcatcaagctccatccccatatggcaaaactagcatctcctttgatgccctatactgcctcatcctcaagatatccaaaagggttttgttt

SEQ ID NO: 1170 - DNA, 201 bp, Homo sapiens
acaaacatttgacaagggtactgaaaatacataagggagaaagaacaatctcttcaataaatagtgctaggaaaactggatatacacatgcaaaagaatgyaatggagtcttatctttcatcatatcaaaaaaccaactcaaaatggattaaaaacttaaacgtaagacctgaaactataaaactcctagaagaaaacata

SEQ ID NO: 1171 - DNA, 201 bp, Homo sapiens
gctaaaatagggagcttatctttatcaagttaagttcctttataaaggcaaagactacatagtttttttttattgttaagcttagccatgctataggaatrcagtaatgtaaaatgcattaactcaaactactaaatatacaagcatatttcatcattctattaggaagaaattttctccataactctctctcataatagc

SEQ ID NO: 1172 - DNA, 201 bp, Homo sapiens
tcaattgtgtctgaacagaaagtataattaacaacgagtgaaggaaagcataaacatgaaatcatctcagtcttatttgttttataggagtcagttttaartgctcaatttgaaagccaatgtcatatcgtactatagttcctaagttaattagaatagcaaacattgtaaaacaaaataaatcagaagcagaaatgacac

SEQ ID NO: 1173 - DNA, 201 bp, Homo sapiens
aaccccaagagagaagtgaggatggcttggactactatggtggcagcggaaaaagaaaaaggggatagttctgagatataaagttaacagtgctaatataraagttacatgcctccaacatgagagtgaatcacagacattttaataggcagttcagaaagaaattcacagaagataacatctacctgttgtggtttaaga

SEQ ID NO: 1174 - DNA, 201 bp, Homo sapiens
ataatatactacactgatgacattatgacggtatcagaaacctaagaacaagctagggctaacttgaaaatagtggtggctcacaggaataccacaggctrgaggataaatccagcaaataccccagggtctaaccaaactgtgaaattcttacgaataacctgggcaggaaccacccataacattctacaggcaactaaa

SEQ ID NO: 1175 - DNA, 201 bp, Homo sapiens
ttaaaagtagattaacagctactattaaaagtaaattaacaacaataataaaatagaaaacttataacaatatattgtgatacaagttattgtgatgcatrtggtctctctctcaaaatatcttattttactatactcatctatatttaggctgtggttgattgggggtaactcaaaccatgaaaagcaaaactgcagcta

SEQ ID NO: 1176 - DNA, 201 bp, Homo sapiens
acataaacatcactctaaaacatcttctcttagaattttttactccaactgagtctccaaaaagaaaaatccatagaggtattttgaatttggggttcaawtacttaaccatatcagatttacactattcttcatttcattttaaatgaaataatttacacatgtacaaaagaagctttcttatctctgagtaggtaggtg

SEQ ID NO: 1177 - DNA, 201 bp, Homo sapiens
gtgtgaaagagcaagaaaaaaaaggtcacaaaagggtcctagagacaaacttttcctactttgtagtatttcttactattagtcccatctaacagaataasctctacataaattcattgaaaattcataaattcattagtaaaccagtatatcaatttaagtttattttttacactgtgaaatataaacacctgccatagt

SEQ ID NO: 1178 - DNA, 201 bp, Homo sapiens
tctctcctctatgtctctttttgactgcacctagcacagtgcctgaaggtgagaagcactcaataaagatttgtgagttgaacagccaactccatcaatartaaaatgatagaatttctggggtaggaaaagccttagagggcattatcctatcccattatttaataaacaggaaaactgaaacctaagagaggttaactg

SEQ ID NO: 1179 - DNA, 201 bp, Homo sapiens
aactctaaaattcagctttaatgcaggtatcaaaaacttcaaaaaaacaaattccctatgtggaatcaaaaagatctttcaggttcattcgatgatttttyactttgctttgtttctgtttccatttagccctattttaatgcttattttactaaactcaaacatagggagtactttattttctaacatgtttgtctccgt

SEQ ID NO: 1180 - DNA, 201 bp, Homo sapiens
ttcatcactattcatagatgcctgtcactattcagaaaaagaagaaagaaagagccatactttcaaagctattttctttttctatatgtcctagtagaggygaatatagaatttatcactttgaagccaatgtagtctgaatcaaccggtcctccatctccagatctaagaatgcaagttaaatgttctctagaaattata

SEQ ID NO: 1181 - DNA, 201 bp, Homo sapiens
ccttccactgaatttactactaaacattgcaatgtttctttcaaattataagaaagttactccatacaaaaagaaaaaaggacacaactcattattctgggtttttttaattttagattcagaaggtacatgtgcaggtttgttacatggatatacagcatgatgctgaacacctcattattttgacatcaggccttcccc

SEQ ID NO: 1182 - DNA, 201 bp, Homo sapiens
tgattttgtgttgtgcttccgagatgtcttaaaggctttccagatgtacccacattcctctgctttgccacatatgttccctcatgattattttgaaaagyatattatagtcaagaaactctcattctaatgcataatgcatgaacttgtcatttttacattaagtacagttttcacttcatcttagccaaaagtccgaga

SEQ ID NO: 1183 - DNA, 201 bp, Homo sapiens
tccatgatgctacaagagctagaaggctatctggtattgattcagttctctactggttatttctacctgctgattaaatctcaaatgcttaggcaaagaaktacaaaaaaattgcaaacagttcaattttccctacaaatcagcttcttcttgtgacccaaactcaaacccaacatctgaaggttcccctccttatcacag

SEQ ID NO: 1184 - DNA, 201 bp, Homo sapiens
ctaggtagtctgcaaagatggctgccacaaattcccatttctccctgtatgcacattccactcttcccatgaaggggtggagtcaactttctctctccccrggctaaccctgtatcttgctttgaacacagaatatgatcaaactgatactatgccagtaacagacaaagcctttaagcctggcagtttatgcgttctctc

SEQ ID NO: 1185 - DNA, 201 bp, Homo sapiens
gctctgtgagtgccctggggacttcaggcagtaagtgcttggaatgattaatatgaaaaatgcatctggaaatgaaaacgaagaggagtctcattctcctyacaaaatgaccctgtgctcaaggaacctgtaagtactgacttttcccactcggtccaaaatccctctgccaaacatgtgttcacagacagtaaatgagca

SEQ ID NO: 1186 - DNA, 201 bp, Homo sapiens
cagggagggccccagcagcacctgctttaggcctggccagccaaagatcaggaccactggagccactaggtctcctggcaggtgactaggctcttgtcacrtaggagggagggaccgtgactcctggcatgagtgaatcttcagcctctaaagccaagaactctgtcagacctcaggttgtggggagtcttccgtggaagc

SEQ ID NO: 1187 - DNA, 201 bp, Homo sapiens
cagcctccagaactgtgagaaaacacctagactatgaaattttgttatggcagcttgaacagactaattcagatggaaactattatttcccccattttacrgaagaaaaaattatagcttacacagactaaataacctccctacagtggatccaagagatagtgatagggccagaatttaaactcaacttttaaccagtac

SEQ ID NO: 1188 - DNA, 201 bp, Homo sapiens
tagtgtcattaactgcaaacaacatatttttctgacaaatgcactaaacttgaaacaaatctttatttgaaaaccaatttgctttcagaaaatgtagtatycagtgatcttaaacaagaggataaagtttctgggttcaagacatcaatttcatctcactgaaaatatgcaacttcaagtccgtatggtgacagcaacgtt

SEQ ID NO: 1189 - DNA, 201 bp, Homo sapiens
tcgttttcagtccattcaaaatactttctcatttccctttgatttcttctttgatccatggattaatatttagtttccaagaacttggggattttccatasatctgtgtttttttaatttcatttccttcaaagagaaaatgttttacagtacttaaatcctttaaaattcatggagttgttttgctcaacatatggtaca

SEQ ID NO: 1190 - DNA, 201 bp, Homo sapiens
tgtaaatacactcattgagaaattgagaaaaagagcagaataatcacatcatttaaatcaacttgtctatctcagctatatcttattgagcccacttcttygaattcatataaattacatgcaactatgatgaaattccattgtaccaatacgaccgtaagaagttagggctgatttttcacagccaacatttctttcaca

SEQ ID NO: 1191 - DNA, 201 bp, Homo sapiens
ctttgtatagcagcatgacattttttgaaatatgaaagttaaaaaacacaaaatatatattccacaaaaaataagcaaaaatattgttcatttgaaagacktaagttttaaaataccaaagacattatactaatttatactaataaagagccaaccaattcctatgactgactctgcccatcagtctgattctctttgaag

SEQ ID NO: 1192 - DNA, 201 bp, Homo sapiens
ttggcaattaatcctatttttcctcccactgctatatgttctatgtgaatgtcttccatagtcaatgacaaattcttacatataaaaattttattatataytcctttcactatcaggtatgggtataatgatcaatcaacacttcgaaggtgaattattatgatctctcataattcatgtacatttatatagtatatattt

SEQ ID NO: 1193 - DNA, 201 bp, Homo sapiens
aggccacttttcatttaaacattaacatttattattttcatttaaaatgttcaatgtgaaattgttaatatgttaatatgtgttttaatacattagtttayaagtaataataaggtctgaaaaacaatttataaaaatgactatatgctgttatgctcaaaataaatcataaacatttttcccagctcacaccaggccctt

SEQ ID NO: 1194 - DNA, 201 bp, Homo sapiens
ttctgagaaatgcatcattaggcaatttcctcactgagtgaacatcatagaaacacctagtttttaggctacaaatctgaacatgttactgtactgaataygcagttctaacacaatggtatctgtgtatctagacaaatctaaacatagagaaggtacagtaaaaatacagtacacagggtaaaaaaaaaagtggcacac

SEQ ID NO: 1195 - DNA, 201 bp, Homo sapiens
tatattatcaaatttgaaaatgtttagagaatttatgtgctcaaaagtatacataaatgtctccagtcccacttcccacttagtactcgttgaggatgaayagataatgacacggaaataaagatggtaaaccattacacactgtaaaatttagtgttcagttacaatctaagaaatgcaaaactatgtaactctaaagaa

SEQ ID NO: 1196 - DNA, 201 bp, Homo sapiens
gttctccaaatgtcccatatttcaaaatttaagccctatatcaccatccgatttcacaggcaacacaaagaatgcgaactgcttctaaggagtaagtgaawgaacatgcctaaacctttttaaaagtaattaagttccatgactatgaacttaaataaatgtataatctatggggtcttaagcagtgtaaaaaattaaagt

SEQ ID NO: 1197 - DNA, 201 bp, Homo sapiens
caattatatcaatgtttgttttacggctaaaaaactgaaaacttcactggtaagatatgaacacatgtttagatcctatgcttttctagaaatgttttgtraatcacaaactaacaaaaaaacattttctggaagaacaacaaattctagttttcatcatcagcgcaaagaatgtcatatttttacttgtttgaaatgagt

SEQ ID NO: 1198 - DNA, 201 bp, Homo sapiens
gtcagactgcagtccagccatcctacccatctacatcacccacgtctaagtttgttaatttgccatgacatgttgttagaaatacactctaagaaaggaartatgcagagcagtacattatcaggaagacgttaatgaaaagctacattccttcagattctgggtccaaaccgtgtgttgtatagatgattcgggtctgaa

SEQ ID NO: 1199 - DNA, 201 bp, Homo sapiens
gagacctccttcatccctggcttcacagtacatccatcctaaatccagtgctgagaggtcagcgtttcccctcagaagcagccgttcatcaaagtttgcayaaccgcactactgccatttcactgaagtaaaaatgatcccctatgtgtgtgtgtgtgagctacaaggaattatttctatattttcctgtcacattttata

SEQ ID NO: 1200 - DNA, 201 bp, Homo sapiens
tatatatatatatataacatttcccaacataccttagaaataccttgtaaaattatctttttaaaaatgtactaaagggggctagggcaaaggaaaaagcratggtgaagtaaccctctcttgcaccaattgttccttccttaattcctcataaagacattcttcattgccctctgcctggaatattcttcttctctgttt

SEQ ID NO: 1201 - DNA, 201 bp, Homo sapiens
tgttagttcaagacagaactaagagtccctactaaagcttgaagtaatctgtctttagaagaaagactgtgactccacccaggaaattgggcataattacrttaagaaggaatggcttcatccagaaagtaccactaataattttctacaataaatctccattttggcttaacagaaataaacttggtcacccactactag

SEQ ID NO: 1202 - DNA, 201 bp, Homo sapiens
gcggagctgggaccatcttactgtgccagagagtaagaaggtgctcagagaatgatggggacatgttaaagggcacagaagtttgaagggaatcccgctgrccacatctgagacaatctggatatcaaaatacataatacgaaaacactatgactcatttgttgaataaaacaagaatccatgagcccatattgataaaaa

SEQ ID NO: 1203 - DNA, 201 bp, Homo sapiens
aatatcataatttagacagaggaatgcttatcttcagtgagtaaaagaaaataaaccctgacctagaactgtcttactcagtaaaaacatcctttaaaaawatggaaaaaatgaatgcattttcgcacaaataaaaactaaaagaccatcaatggataaatggataaacaatatgtggcatatacatacaatggaacatta

SEQ ID NO: 1204 - DNA, 201 bp, Homo sapiens
aggctgagatcaagtgctcaggatccttggcctctccacttggagtcatgagtgtagattttaaaaatcatgcaggcggaacatttccagtcaggagagcrctgagcccagccctgggtcacaccagcatttgaaggtctgatggaggaggaagagggaccaaaggggagtgagagacctgtacagagtctaagaaggaga

SEQ ID NO: 1205 - DNA, 201 bp, Homo sapiens
tatctgtacacagataattatttgtctaaaatagtatttctactatacacaattaagccctcaaatgctttaaagtaataaaaacggacactggacatacygtgttgtatctgagaatgacaaacactaaaggcaaggctgcagttagttaggacaggtccctgaccttcggctgccctgcctggccagcgagccatcatc

SEQ ID NO: 1206 - DNA, 201 bp, Homo sapiens
gccttcttacattaaacagctatcctccccctcactttctatcttcacattgctttttcttcaagactttgcgacatctgatacacaggcacgtatacatrcacacatatgatatacatgtatttgttactgtcaatgttcatcaccaataaaatataagttccacgagggcaaggactttaaaaaaaagtttattgatgc

SEQ ID NO: 1207 - DNA, 201 bp, Homo sapiens
ctctcgacagtagaatctgctgcctgtgaccatctctggcacagcattagcctccaatcgcccctctcccggacactgagtccacatcagcactatggatraatctgcctccaaaaaaggaatgagaggagaagacatatagggaaggaatcaaaaagaaaaggaaagaaaaactatgatgtgaacccaaagatgtgtaac

SEQ ID NO: 1208 - DNA, 201 bp, Homo sapiens
tgtggcgcagtgagcccaggggctcaaggtgttagcagtcatcaacagtgctatttgaaactgtgggtggatgaagaggtgaactcaacaccacaaatatsacagagcagtaaccaccatggaaaagaaaagagagcttatgtgtctaggacaccccaagaaatctcttctgaatgaatgatggcaatgaaatagccatta

SEQ ID NO: 1209 - DNA, 201 bp, Homo sapiens
aagctttggcagaaaaacttctgggaaagcttcaccagagagtcctcctccaccaagataatgctcctgctaaatccctctcattaaacaggggtatttcrtgagagctttcatgagaaatcattaggcatccaccttacagtcctgatttggctccttctgacttatttttcccctaaacttaaaaaagcttttaaagag

SEQ ID NO: 1210 - DNA, 201 bp, Homo sapiens
aaaatcgccattttaaagtatacaagccatagtttttattacattcacaaggcagtgcaactaccactactaattccagaacttttcatcgccccaaatayaaatccagaactcattagcagtcattctccattccctcatcccctcatctcctgaccatgaaaccactttctgtccctaaggattttcctattttggata

SEQ ID NO: 1211 - DNA, 201 bp, Homo sapiens
gtgtgtaattagcaagagaactgcctaggtttaatttattggccttgcactgcaatctagtaaaatgcaaaacaaaattaaacaatgtgtccactttgtamagatattttttctttaactcaacaaaacactaatgaatacaagttcattggagtgtttctaagttaaggcacagtgtattttgaaaattccaacagaata

SEQ ID NO: 1212 - DNA, 201 bp, Homo sapiens
gaaaacaacataattgccaaaatttgttttataaaaggcatttcccccatcacataacttcaccatttctagtaatcatcacacccccagaccaaagcacraagttaaagaaggcccttataatacacataaaaagtcaacaacttccttcagactaagaagaacaaattctaaactagagaaccctggatgagaatgacc

SEQ ID NO: 1213 - DNA, 201 bp, Homo sapiens
taatacatacttttgattgaatgagctaatcttatttggggaacatacctgttcttgaagatttagttcaaatgcacctttcctcctaaaatctcctgtayaggagaacatttgtggggatgttatttttatcgtggtgatgatttcatgggtcaaaagttatcagattgtacactttaaatatgtacaaattatttataa

SEQ ID NO: 1214 - DNA, 201 bp, Homo sapiens
caatgaggaacataaagaacttccaagaataccacagtattagcatatttggtcaaaaaaagataaattccagatacatttacaatgtaacagcaaaaccmagtaagtagaaagaggaaaagagctctgacgaagttcactcctttgcctccatctctgcccacttctcctggtgctctttctcacgggaagaggtggagc

SEQ ID NO: 1215 - DNA, 201 bp, Homo sapiens
tggtgctctttctcacgggaagaggtggagctaatgttattagtcaacttctacattggttacgtcgcttctcccttttaaataagcagattcatgcagtrtgagatcatgagatttcagcaggtctggccattgttctttttttccttctctttttctctggatactggccactggtatgagttactacagccaggaatt

SEQ ID NO: 1216 - DNA, 201 bp, Homo sapiens
tcactggcctggaagcttctctgaacactttgcaggccgaggcatggttgtaacctgtttgtagcacccagtctgagaagctaggcttgaatgtaggccaractaaatatttgaaagtttaaaaacaccatatatatggtatcattttaattaaacgactgacattgtgattaaacaaaggaatgaaaatagcagttccta

SEQ ID NO: 1217 - DNA, 201 bp, Homo sapiens
  misc_feature (1)...(201): n = A,T,C or G
tattttttcttaggcctactgactttttcattctggttccacccatgtggacttcaagtaacaactcagagctagggtgtgctgattatagagcacataangtgcactgtacattcttgccttaagaagaactaagtaatacaaattaaacagtgaaagacagtagtaaacaaaggcaatgtaatggagaagtctacaggg

SEQ ID NO: 1218 - DNA, 201 bp, Homo sapiens
gaatgatcgggttcaaaaatgctgaagtgaggaaaccattccatgaagtcaagaaccctattttgacttacagtcttccagcagagcagcttgatatgtasgaaatcatcaataaatatttgccaaattaataaatgtatcactcaagtcctttttaattattattggtttttttggagacagagtctcgctgtgtccccc

SEQ ID NO: 1219 - DNA, 201 bp, Homo sapiens
actctaattatgggatgctctacaaaataactggcatgtaatctttaaaagcataaaagccataaaaggaaagactatgaagccattccacatgaagagastaaagagccctgacaatcaaatgcacagatcctgggttagaattttgcaatgaaagacattatcgaaagaattggcaaaatctgaatggggtctgatgat

SEQ ID NO: 1220 - DNA, 201 bp, Homo sapiens
actttttctcatttttcataaaaggcaacaggctgatgttcatatatttctcttgaatgcggattcagtttcactcattgccctgtcttggaaatccccaygttaatgatggcttaaattaggttgatagagtcctcccttggagtccagcttggaaaatcctcactggagaggggcaggcccacttctctttttggaaga

SEQ ID NO: 1221 - DNA, 201 bp, Homo sapiens
atcaagaatgacaaatgctcccggctctcgggcggttcccggccaatggaggagagactcacttgtaaaaaaaacatgctcaactcaaacaggacactgargcatgaagagaaatggccaatattgcagatgagaagcctgggagggcttgcgcctgcttagacatggctcatgatcgtcgtatgctgagcacttttatgt

SEQ ID NO: 1222 - DNA, 201 bp, Homo sapiens
gtgtctttaaactgacaaaatattcacattgaaaataatcttatagatctagtccaatcccctcattttaagatgaagaaaacactgagcccctaaatatycatactaaagtcatactaaagcatcacaatatcaaccaccacccaattaattttaatccaatcctaactgcagcttctataacaggtcctttactcttaa

SEQ ID NO: 1223 - DNA, 201 bp, Homo sapiens
gatgaggtggggtgttggagcatcaccatatatatacatcacacacacagggaaacactcctacttggatggaggatctttgctgttctgttgaggccagyctgatcctggaggcagggcagggcctggctgttgcccaggctccaaagaggcgccagggcgtcccttagtccttacactttctccagaacctgcgggcag

SEQ ID NO: 1224 - DNA, 201 bp, Homo sapiens
gtggtaccccctccccactgcacgatcctcaggaagaattcctttattgaaaccattattgaatagggtagatttaggcacgggaaatgtaaacagcaaaycagccactaaaagtgcgttaatgtcacgcctgtaatcccagcactttgggaagctgaggtgggcggatcatgagatcaagagatcgagaccatcctggcc

SEQ ID NO: 1225 - DNA, 201 bp, Homo sapiens
atttatttgttagcatatatatatgtgtttgcaatatccactcaaaaccaaattttaccaatttataagcacatttaaatgaaaaagaatcagactggcaytggctgtctcattagcaaccatggatgctgaaaataatttaagcagttctcagatgttggagaaaatgattttgaacctagaattcctcagcgaaattat

SEQ ID NO: 1226 - DNA, 201 bp, Homo sapiens
aaaaaatcagggaatactacataacaagctatttgtgctaggtagtctgcaaagatggctgccacaaattcccatttctccctgtatgcacattccactcwtcccatgaaggggtggagtcaactttctctctccccgggctaaccctgtatcttgctttgaacacagaatatgatcaaactgatactatgccagtaacag

SEQ ID NO: 1227 - DNA, 201 bp, Homo sapiens
aagctctagaaagccagctctaatgctgtcagttagtccatattatcctgctggagagagaggccatgtggagagaccctggaagataaattaccactccragagagagaccaagtggaggagaaccaagacaccatagccaacagtcagcaccaaggccccagacacataaggaaggttttgttggattttccagcccac

SEQ ID NO: 1228 - DNA, 201 bp, Homo sapiens
gagaggccatgtggagagaccctggaagataaattaccactccgagagagagaccaagtggaggagaaccaagacaccatagccaacagtcagcaccaagkccccagacacataaggaaggttttgttggattttccagcccacccatgtataagctgtaggcagctgattgagagccatgcatgcaagaccaacagagtg

SEQ ID NO: 1229 - DNA, 201 bp, Homo sapiens
acaggacaaacactgtatgattccacttatgtgatgtgtctaaagtagtcgaattcacagaagcagaaagtagaacggtggtttccaggggctgggggtaygggaatggagagctactgttcaatgggaacagaggttcagtcatgccagatgaaaacgttctagagatctgctgtacaataatatgcacatagttaacaa

SEQ ID NO: 1230 - DNA, 201 bp, Homo sapiens
cagtgaaaaacttaccaacaaagacaaaactccaggtctagggagagcttcactagtaaatcccaccaaatatttcattaataaataatacaaatcccatrcaaacaattcaataaaattaaagagaaaggaggagtacttccccttttgtttttaaaaagcaaacatgatcctgaagtgaaaattatacaaagacatttt

SEQ ID NO: 1231 - DNA, 201 bp, Homo sapiens
tcttgtatagccatagtatgaatatcaaaacaaagaaattaacatcagtgcaatactattaactaaactaccaactttatttcaatttcaccagtttttcyaccaatgcccctgcctagtccaggacccaacccaggatcccacatcgcagttaagtcatcatgccactttagtctctccaatctatgagtgttccatcat

SEQ ID NO: 1232 - DNA, 201 bp, Homo sapiens
ttgtaaattagtcacctgattctcacagaaaacttgttaatttctgctgtacgccaaagccactaatggatgaaacttacgattagttccaacatgaataytggttgacatttttgtttatgttaaagtcaaagctgaaagtgatacaatggagacttcagaacttcacttgtcagttatgtgagtgatttctttgctaaa

SEQ ID NO: 1233 - DNA, 201 bp, Homo sapiens
tccttatccactacccttgccactactgccttggctctagctacctcctagatatagttatggttcccaatccatgtagtcagttactgtgtttcttttamgcattcattctattatttccagctgctcacttgacatttccatcttggttttatatagaaacttcagactcagtgtacccaaagttattatcaacatcta

SEQ ID NO: 1234 - DNA, 201 bp, Homo sapiens
aatgactttgagcaaatctttgtatcaaaatagttgtcaaaatattctcatctatttcagctattttaaaaatgttacattatatgcaagatattaaagayagtaggtttcaaagaaaaaatcaggaaaattttggcaagcaaaacattttctaagaatggggttctaaaaaactaaaaagaatgcatcaaatactgcact

SEQ ID NO: 1235 - DNA, 201 bp, Homo sapiens
attacagatctgatacacaactactacttctagtactgtcacgaaaagcccagcattaataatggtaatgtactagaaatttcaaggtccaaaaaaagtgmgagacaccatctgaggtaaaaggaagaggctggcttcagctcctgccaatcgctccctaacactgaccatgtaaatctgatcacagtatcgccttgctct

SEQ ID NO: 1236 - DNA, 201 bp, Homo sapiens
atgcttaatggatgcatccactaacaaaagtagtgatgaagtcaaatatgaagtcataagaaacaagattgtatattaaaaatctaagtaatgcttactayttctatcagagggttgttatctaaaaggtcatgcttttgaggagagagaaaaaaaaaaacactagacataatacatcatagaatttccaccaaaaaaaag

SEQ ID NO: 1237 - DNA, 201 bp, Homo sapiens
aaagggtaacattttttgcccagttgaagtggacaggcattacttgacagagggtcttgattcagtgtgtatatgaagaaatggtagatttttaaatcttytttcctgtgcttagtgggcacaaaattgtaacaaaaattactatgtttcctcctgttcttgctgatggctagcataaaattaaactttaaaaatcctagc

SEQ ID NO: 1238 - DNA, 201 bp, Homo sapiens
aaaaataactaaaatcagagcagaatggaacgaaattaagacctaaaaatccacataatgaaatgatgaagccaaaagttggttctttgaaaggataaagragattgctagactgctagtgagattaacaaaggaaaagagagaagatataaataaccacaattagaaatgacaaagattacattacaacttatcccacag

SEQ ID NO: 1239 - DNA, 201 bp, Homo sapiens
agttgccatcataagtaggactcattaaagcatggcaaaaacattgtttcaaaaaaggaagaatgacagggcagacaatgacaaactctgatgcctaaatrggtatacagtcaccaatggcatgagacggcagctgtactgtgctgttactacatatagaagttgtcaatggaatttagaaatgacagaccaaaatctcaa

SEQ ID NO: 1240 - DNA, 201 bp, Homo sapiens
gtatgttgtcttggcatatatgaagaaaatccagcctcatgcagatatgaatagaaaaagggagaaaaatgttaacaaactttttggattactgttgatamtattcaaatcgtttgctgttacacacaatagttgtaggaatcaccttgtatatatcacataacaaacattcctaagtttacctataggatccacttccag

SEQ ID NO: 1241 - DNA, 201 bp, Homo sapiens
aaataaaagaattaaaaataaaggaaagttaatactattttccactaagaagaaccagagctccctagagagctgcttctagaggtaggaaagtatatgamgagactggaatatcttgttgtcccagcaagtcctcaaaaattgatggagacatgtcaaaagaatttaaaagccggcctgaaagtgctttcatgggcccaa

SEQ ID NO: 1242 - DNA, 201 bp, Homo sapiens
atatttttatattccttaaaataagcaaaattccaacaagatttttgatgaaacctggaaaactattctaaaattcacatggattgatggatttatttaaycattcctttttgagacagggtcttgctcagtcacccaggctgctgcacagtggcacaatcacagctcactgcagcctcgaccttctgagcccaagcaatc

SEQ ID NO: 1243 - DNA, 201 bp, Homo sapiens
gatcacttatctctgtaggaagaaaagcaatggccattcctagcatactttcactcaaaaacaggtttcgtagctagaactattttccaataataaagccwaacatcagctatcaatctaataatctccaatcatctcaagtcctccaaacacattaaaatgaatttataacagtaaatgtatcacaagcctcaacacccc

SEQ ID NO: 1244 - DNA, 201 bp, Homo sapiens
tcacgcaccaggttctcagcttccaatatttagttgacgttgtttgcctgctgtcatctctcatctcgttctctttaccctcatggatttctgcttttatrtgtgttcactatcatttaagtggggaaggaaatacatgtcttctctgataatactggagatttttaaagttttcttttgatcccttatggtatctgtttt

SEQ ID NO: 1245 - DNA, 201 bp, Homo sapiens
tccatctgcttatttgaaagaggtatagcagcttctgtctcctgttgtaacctctcccagtctctgatttctttcttccatttaggcagggattaggaaayaagaagagatgtacaggtgtagccaatctgtcacttttggtcagaagccctgagagagctcttttgaaatcagctatctcaggatactgacttaaggact

SEQ ID NO: 1246 - DNA, 201 bp, Homo sapiens
cccaataactatgtccaggtgcaaggagcacgttttattctttttgtttctttagttgctataacatgataggcatgtacttggtaagtatttattagggraaaaaaaacacttgaaaggtcccagttcagaatgtcagaagcataatcaagacacttcatatacctgcagtgctttgcaagcatcaaagttgaaagtgct

SEQ ID NO: 1247 - DNA, 201 bp, Homo sapiens
acctattaaccacatcaaatgacttcttactataaagattgagaaattaagataccctctgccctttcttcccaatttttgttactttcattttcattttyagcttttctactggtttgtattccacattaaaaaaatacacttaagcctctatttcttgacccaggaattttagatggaaatgtcttagctcctaactgt

SEQ ID NO: 1248 - DNA, 201 bp, Homo sapiens
gaacacttacagacttttttcttgtcattattccctaaacaggacagtgtaacaaccacttacatagaatctttacatggcatttgcagtggattaggtawtgtaagtaatttaaagatgatttaaagcatacaggagggtgtgtgcaggttgtatgcaaatactacaccattttatgtaagggatttgagcatcagcaga

SEQ ID NO: 1249 - DNA, 201 bp, Homo sapiens
cttacctaatttagataccttatttactagtccattctgggacaatcagggtacaacccactatctttgtcaggaataaccattcagtcaaatctaccaaytcctaccctgtcagttctgttttgctacacaaaaatttgacagatatacaacatggttctagaattccagtgctgcccttaccgaaactctctcctgaac

SEQ ID NO: 1250 - DNA, 201 bp, Homo sapiens
cagagatgcctcctatgctgatgtgcaaccaagttgtaaggagctgtcctggatccatcaaggaggaaaacgcagacaatactttacttgatgtttgctcygtgatgtttcttttattgccatttctaacaccaacaatactatggtaatgtgttatctcaattaatacttatcattttcaactgtccagaaaagtgtaaa

SEQ ID NO: 1251 - DNA, 201 bp, Homo sapiens
tgtttgtcctccaaagatgttagtaacattaaatatatcttactaacacacacatatatgtgtatgtatgtacatatatatatgtatgtaaaatacgaggyagaaggtactcaacaagtggtaatttattactatactactccacaatatactcaatatttcaagaaataattatctgctgctgataggcaaaccactgaa

SEQ ID NO: 1252 - DNA, 201 bp, Homo sapiens
tcttgatgattctgtctttaatgatacctctttttcctaaattgtaactgcatgtattaattgcaaaactcccttcaaaacttagccataaaacatctcaraataccaatcccaagggtctgtggcatatttttgctactagactataaattctttaaagccaagggctagatcttgtatctgtggaataagaaaatgaac

SEQ ID NO: 1253 - DNA, 201 bp, Homo sapiens
tgtcaaaatataattaaaagctaagtataatataatcttcatgtgttttatcaatactacatagagttctatgatttttatcataaataggatctcagcckgacttggcctgtctgctctggtctaaaagatgtgaggagaaaaaaagagacttgttaatatcataatattatcttaaaccagtaattcgaataaagagat

SEQ ID NO: 1254 - DNA, 201 bp, Homo sapiens
atcaacgattcaatagaaagccccaacagtatgtaagattttttgaatcccttgctgttgcataatggtcatcatccaattttaatcaaacacacacacayacccagtattcactcaacctcaaccaaactttgattctcagtacatactatccttgctttcttccctccaagaaaccgccaaagttctaaccaggtggtg

SEQ ID NO: 1255 - DNA, 201 bp, Homo sapiens
caaaagccctattaaatttccagccagtaattcactagctatattacttaaaagttaggaattgtgtgcacagttcttcttatagcacctaggacagtgayaggacataggagtatacaataaataccctgattgggcaactgattggctggctttaaacgtaaagaatggaggacagacacttaaatgaggggcgtgccc

SEQ ID NO: 1256 - DNA, 201 bp, Homo sapiens
aaaagatctgaaatctatcttaactgtctaatgatcagggagaactgttaggtaaataattataaaatgctattaaaagtccttaatgatatgggaaaacsttcataatattaagagaaaaaaagcaagatataaaattccaaatgttgtattttaaaaataaaaatatgtgcatagacaaaagattaaggagacataaaa

SEQ ID NO: 1257 - DNA, 201 bp, Homo sapiens
tactcatctgcaaaatgggggtgatagcgctttcctcataaggttgctatgagaattaaatgagattaattcaggtaaaacacctaaaatagtgcttggcrtgtagtaacagctcagtaaggcatgggtgtaattgttattccctgactcctaaatccaggttaggagccccttctgttattccttcttcttcttcttact

SEQ ID NO: 1258 - DNA, 201 bp, Homo sapiens
cataacctctgcatattcaatgctttcatattcaattgtttgtttttaaagaaattagtttattagagacagagagagaacgaatctttcccttgataatytccactaaactttataaatatgcttagaatggaaatgaatgagaagaaacagaggatgaaggagacatcagaaattttcagccctgtgttttacctctgg

SEQ ID NO: 1259 - DNA, 201 bp, Homo sapiens
agaacaatatttgaagcctctatacaacttttataaaacatttgccacaaggcaagttttggtgtgtgcaaaaatccatttgtagaccagctgtgacagamtctttaaagcatatccaaggcaatgataaatgaagcagacattcatgccaaacgcttggatttagatttacgtatcaagaaagctttaataagtaatcct

SEQ ID NO: 1260 - DNA, 201 bp, Homo sapiens
aaatatcagattgaataattcagatgaatactccactgagaacaatttaaaatgtaagacaaaattaggactctgataagtcaattgccacattaagctgraatcacaaatggctgatcgttaatgtcaatggggaaccaaaaaataaactaaatcttgcacagatctgcaccctagattcatgtcacctgagtggaccag

SEQ ID NO: 1261 - DNA, 201 bp, Homo sapiens
taattcagatgaatactccactgagaacaatttaaaatgtaagacaaaattaggactctgataagtcaattgccacattaagctgaaatcacaaatggctratcgttaatgtcaatggggaaccaaaaaataaactaaatcttgcacagatctgcaccctagattcatgtcacctgagtggaccaggaaactttaggcttt

SEQ ID NO: 1262 - DNA, 201 bp, Homo sapiens
gtaaatacataacctaaaccaatgagtttcactcatttgtcagcttcaaccactgacaaaacccagtggttgcctagtgatgtatagttctactaaaagayatatatgaccatgctttaccaaatacggaacacatgtctaaactgttgagacaactgccaatgtattaactacaaaaagccattattttttactttagcc

SEQ ID NO: 1263 - DNA, 201 bp, Homo sapiens
tttatttaaataacgttgttctttctcttagactatgccggtatgaatttggtagaatctgccgattgtggtatgtcggtactccatacagagtgtgtggyagatttcttctctattttgttatcacatccagtaatatggagtgcagccagcatgttcatccctgggaatgtccctcctaaattttgcaaagaaagcctt

SEQ ID NO: 1264 - DNA, 201 bp, Homo sapiens
gtactttcaaaagcaaactctggctagcacaggaaaaatcctttgacaagagaaaggctaaatggatacaataatgatgattagatcatacttacacataycttccaagaaatttctatacttcttttttattctgaagcaatagacattatgggattccaagaaactgagccttcataacccaagtaacaatagccattg

SEQ ID NO: 1265 - DNA, 201 bp, Homo sapiens
tttttctaatttgccataagaaacaaattaagttcacttaaaactcaagtttattttaaaacctgccatgtatctgacattggacatttaataaactggcyttaaactgatttctaacactctttgtgaagtatcttcaaaatacccttcacctgtctttataccagattaaaacaacgtaaaaggcgaaggaacactatt

SEQ ID NO: 1266 - DNA, 201 bp, Homo sapiens
agaaactcaaatttaaaagtgctgctataataaagttgctccttcaagtatatatggggcggcagagaacaccagagcctcgcgggtcacacaggacaccrtgagtaagcctgtagatggcaccaatccacgaccaatctattgtttacagaaacagtcattttgggttgtgcttctttatgcaagatatttaacaccttt

SEQ ID NO: 1267 - DNA, 201 bp, Homo sapiens
ctttcttcccaatttttgttactttcattttcatttttagcttttctactggtttgtattccacattaaaaaaatacacttaagcctctatttcttgaccyaggaattttagatggaaatgtcttagctcctaactgtgtaagataaggaaattagtattcttacacagcaagcatttttaatcataaagtttaaccaaag

SEQ ID NO: 1268 - DNA, 201 bp, Homo sapiens
cttagctcctaactgtgtaagataaggaaattagtattcttacacagcaagcatttttaatcataaagtttaaccaaagaattaaaatatgactatttggycttacccaatcctgagtgagaggaaaaaaatgtatgtacgtacttgtcgctttagtactatttcatttaagaaaaagtgttgaaaaatataggagcagta

SEQ ID NO: 1269 - DNA, 201 bp, Homo sapiens
tggcatactgctcgcctccaaacttggtagggatattaggattgactatgaaactgtaaatacatggacataatcctacacacaaatatggatatattcayggccacctatataaaagaaataaatacatgagacaaaggaaaagtcaaggtggctgatgattttctatgccttttcagcaaacacggattagagtcactt

SEQ ID NO: 1270 - DNA, 201 bp, Homo sapiens
caaaggaggtagaaaagatagggagatttttatttttcattttatacctttgtgtgttattcaaatttttatgtttatgcaactattcatctcaaaataarcacatacacattattagaaacacatacacatacacatctcaaaataaacacatacacattattagaaaaatgatggcaaattcttattcatttttttttc

SEQ ID NO: 1271 - DNA, 201 bp, Homo sapiens
aaactgaaaagaaatttacagatcaatactcttgtaaatgcaaaaaacccttagcaaaatatcagtaagtccaaattggtaatatatttttttaaatacaycatgaccaaatggaatttattccagcaatgaaagtaattcaccatattaagagaataaaaggaaaaaatcaaatgaccatttcaatagaagcagtaaaat

SEQ ID NO: 1272 - DNA, 201 bp, Homo sapiens
tgtatatatctcaatctacaatccttagaaatccatcaaaccataattgtgattagagatgtactatgcttgaaaaaccttatttttacttacatttctayagcactacattggcacctatatattaatagttcttatgtgatccacccaaagaagggtgaacgtcaaatattgctatccacattctacaggccttgtgga

SEQ ID NO: 1273 - DNA, 201 bp, Homo sapiens
aagagcttacttgtgtaaccaaataccacctgttccccaaacgcctatggaaataaaaaaaaaagaaaaaaagtacataataaaaaaaaaattagaatcartgtcatagaaagcaatataacgttagatttttattttctagaataaaacagtctcaggtgacataaccaaatatagtgtaaggaccctggattttaaaaa

SEQ ID NO: 1274 - DNA, 201 bp, Homo sapiens
gacatactttctgccatgactgatttgcttgtattttaaagaattttatgcaaatggatcatagagtatgtactctttatctggcttgttcatttagcatkattactttgatattcatccatgtcaccacatgtatcaatagtttactcactttgctgggtaatatttcagtacatagatgtatcacaatggacacactca

SEQ ID NO: 1275 - DNA, 201 bp, Homo sapiens
gactataagcagcactcagctacatctctcaaaaataagggaaagccattttaagagcttgaagtagtatgttgtagtcctatgacattaatagtttaacrgaaaccacatacaacttgaagactaaaactatcaactccctaaacaactcacagtgtacgttaacatgacttgactattcagggagagcctcaccctggc

SEQ ID NO: 1276 - DNA, 201 bp, Homo sapiens
taaattcaccaagaaaacaatccttaatctaaatatgtatgcaactaacaatgaggcttcaaaacacatgaggcaaaacctaaaagataaagtccacgatyatagttgacgacatcaactatctttttcagaaaccaatagaacaagtaggcagaaaatcagtaagaatatagaagacataaacaatactaccagctgtct

SEQ ID NO: 1277 - DNA, 201 bp, Homo sapiens
gtggactgggtaaaagccactgtaaaatttgtttaccctgaaaagggaaatggtccttcccctcctttaaatgccaagtggcactcctccatagatgacawagctggtaagctgcatatgcaaaccatgctggattaacttcatggtcatcaggatgtttgttcatccttaatatgccctttaaatcatggtaaatactgt

SEQ ID NO: 1278 - DNA, 201 bp, Homo sapiens
tacatacaatcatgcaccacataacaatgtttcagtcaatgatggactgcatatacgatggcagtcccctaagattattacactgtatttttactgtaccyttcctatgcttatatgtttagatacataaatacttaccattgcattacaattgtctatagtattcagtacactaacatgctgtacaggtttgtaaactgt

SEQ ID NO: 1279 - DNA, 201 bp, Homo sapiens
aaaaagtctatgcatgttcagtatgaacgtaaccattcttttttttttttctcaagtatttttgacacacagttgatagaaccacagatgcagaacccacratgggtatgagaggcgaactgcatacctattatctcaactccactccactggatagaacatacttctctttgcttccaaaattaagtccatcctcaaaaa

SEQ ID NO: 1280 - DNA, 201 bp, Homo sapiens
aggcctgtactttaaatcatctctagattatttaaaacacctaatacaatgtagatactatataaatagtcacactgtattgtttaggggaaaataagggraaaaagtctatgcatgttcagtatgaacgtaaccattcttttttttttttctcaagtatttttgacacacagttgatagaaccacagatgcagaacccac

SEQ ID NO: 1281 - DNA, 201 bp, Homo sapiens
agtgaccttgactgtgcatatgccttcagttcttggtagaacagtgttcacttgctcatgattgcccgtgaagtctcgacatccacatgtgatatgggctkcttctacagtatccaccaggaatttaaaaaaaaaaaattatatatatatatatatatcccaacagttgttcagtccttctaccaaatgcttcctaatcaa

SEQ ID NO: 1282 - DNA, 201 bp, Homo sapiens
tggaattcactgatacacaaagaagatttgtagccatgacagcagaagagctaagaatttgcagagggcagaaaaggctcaagaacagagtaaggatgggwtatagtcacattatgtaggtatcaaaagaaagtatgtcagtaaaagagcacagtccaatgcagcaatgaaacaggaaagccaaacatcagggaagccatg

SEQ ID NO: 1283 - DNA, 201 bp, Homo sapiens
gcagaaaattaactacaaggtgagaatatgaaagatgccagtgtggacaaaccatgcaataaaattttattaaaagagaagcagaaatagaggcagtagcrgaatgggaagcaatatgtcaagagggggcttttctttttaggatggaagatactattgcacctttatatgccggtgtgaatgataaagcagagagggaga

SEQ ID NO: 1284 - DNA, 201 bp, Homo sapiens
agagaaaacacaagttcaagaggtacagcttctctgcattctccactgggaagtagagcagtgaataatattactcacacagtgtgaggattccacaaggyggaagatactcccccttttccatactcagaggattttaaatctttccacccaaaacttctgagcccctcccccccaacaagatacaaaatattttttgaa

SEQ ID NO: 1285 - DNA, 201 bp, Homo sapiens
tgcatgcaagaccaacagagtggcccaaactacaaaatcatgagatatttacatggctattgttttaagacattaaatttgaggtagtttgttccacagcrtgagggttaatactgagtgtcaatttgattgtattgaaagatgcaaaatattgatcctgggtgtatctgtgagggtgttgccaaaggagattaatatttg

SEQ ID NO: 1286 - DNA, 201 bp, Homo sapiens
gaaataatttttcaaattaatgctattcttgttacctggaaagtaactttatcttttgaaatcttactatttctccaaacaatctcaatgtccaaagaagmttttcttgatgattctgtctttaatgatacctctttttcctaaattgtaactgcatgtattaattgcaaaactcccttcaaaacttagccataaaacatc

SEQ ID NO: 1287 - DNA, 201 bp, Homo sapiens
actaaggggcaagaagaggtaatgggcaagctctgagtcactcttactggatggtctcagtacagcaacagtaactaggataagccaaggcgtcctctacrcacatagtgaggccagcttgaaacaaggaagtacatagttgcagacttggaagctagccaccgcagctatttaaaaatcaatagagagattattttttaa

SEQ ID NO: 1288 - DNA, 201 bp, Homo sapiens
ctccatgttggtcaggctggtctcaaactcctggcctcaggtgatccacccacctcagcctcccatagtgctgagattccaagcatgagccaccacatccracaaccttatcatttttataagtgaattactgaaaaccttctaactgcagcaacctcccaagtattttccttgcttccacttttgtcctctctacttcaa

SEQ ID NO: 1289 - DNA, 201 bp, Homo sapiens
ctcctgaccttgtgatccgcccaccttggcctcccaaagtgctgggattacaggcgtgagccaccacgcccagccacagtaagtctttaataaaaatatasgagtatgaatactctccagaaaaataatcctcctccaaagcctgatcttaagaatttattggggaaatactttacagttacactcttccctttacatgtt

SEQ ID NO: 1290 - DNA, 201 bp, Homo sapiens
aaagaaaaaaggagaaaagtcagagcttctcttttttgttttctagttattccattcatattgattggttctgaaatgttacaaaaatttttggtgttctrgaaaataagtaatatggaaaatttttacctaaggtcactgtttcttctcaattatttaaggtgaaagtaataaaccagacatttaagtaaacatgctcac

SEQ ID NO: 1291 - DNA, 201 bp, Homo sapiens
tataaggaaacagcaagtcaaaataacaacaggtgacttttcatcagaaaccatggcagccagaagaaaatgaaatgacatatttaaaatgataaaaaaamcacaattatcaaattagaatcctatatacaatttaaaaaatccttcaaaaatgaagatgagcccagccacagtggctcacacctgcaatcctagcacttt

SEQ ID NO: 1292 - DNA, 201 bp, Homo sapiens
cctctcttctaataatgtgacataggttagcgcttaatgtatatactgtcttgaattattctctgtgtgtttcatatactggtcttattctctgggtagayaatgaaagcctggaagtagattatgtacaatttgcctcatctctatttattttcccagtttccttattatagagcacgctttcactctcaacagggtact

SEQ ID NO: 1293 - DNA, 201 bp, Homo sapiens
tgtttagattaaaatgtttaaaggtttaatttcaaccaacctctttagccatttaaacactaattttattctttctaaaataacatccaatgtgaaaaacraaggcataataatagattccttttttttttttttttttgagacggagtctcgctctgttgcccaggctggagtgcagtggcgcaatctcggctcatgcaa

SEQ ID NO: 1294 - DNA, 201 bp, Homo sapiens
ccattggaatctccctaaaaactcagctgaatcttctgaggcctctttcatccatcgctacttaggtcactcttcaatttctcaggatggttgtttcaaawctttcccaggccttcttccttgcctggtaggtatacttaaatgtacacactaacccttacctagtcaagctactaagctaagactagaacccaggtctgt

SEQ ID NO: 1295 - DNA, 201 bp, Homo sapiens
gaattacccaaaatgtgacacagaggcacaacataagcacatgctcttggaaaaatggcactgatagactggctcgactcaaggttgccacaaatcttcamtttgtaagaaatgcagtattagcaaagtgcaataaaacaagctaggcctgtactttaaatcatctctagattatttaaaacacctaatacaatgtagata

SEQ ID NO: 1296 - DNA, 201 bp, Homo sapiens
aaaatttcaggggaggggtctcatcaaatatttgttcaagctatgaaatacctggaaatctgatttttgaagaagtgttagccctacatctgggaaatttrtatcattaatgttaacttcatcacatatataactgtatgttccatatatcgtcaataaagaacactaacagtataaactccagcctagttcttcaaagac

SEQ ID NO: 1297 - DNA, 201 bp, Homo sapiens
tcatcattatctgtacctcagtaagcataataatgctgttttcaaatgtttccagtgactttgaaaggaaagattttcttaaaaccaaggcatcaggaagraaaatgcatggaatcatcagtatcactgaagtcatccaaaatacaataaaataaaaaagtatataagaattttacattgcataaataatctaagttcctg

SEQ ID NO: 1298 - DNA, 201 bp, Homo sapiens
gatttctactcagcgctgagctacttgcccatgactccacaggctttccaacattgtctgtgactcttagtgattctaaaattctagcaatggcacaagaytgagtggaaactctgcctcaccacaggactgaccatgagtagctcacttcaatggattggtatttcacaacttagcctggacatcggtcaagttggtaag

SEQ ID NO: 1299 - DNA, 201 bp, Homo sapiens
cacacaaaaatgagtaggaaactctatgagctcatggtacacaccatactactgatcattctacccatgtaattataaagtagtatttcatttatgctatmaagggtttaatcaggtcctgtgaaccctctagtccaacaaaaataatgttacgtgtaattacaaataaacagtataatagaaataaacctatatttttta

SEQ ID NO: 1300 - DNA, 201 bp, Homo sapiens
cagcctcaacaacagagcaaaactgtctcaaaaaaaaaaaaaaagggtgaagaaaaccgactatttattgactccctagggtctaggagctcgactgagtrgctcatctactttaacatccattaatcatcacaactaccctctgattagatattattctcattctactgagacccagaaacattagaaatttacttatgg

SEQ ID NO: 1301 - DNA, 201 bp, Homo sapiens
ttaaggatgtatcccctccactgcacactataaccaggtacatccttttaaaaaaattgaatactgatttggaaaccggatgttcaaaaatttcatcacaytgatatttaagactttccataatctgattactaactctctaatctgagcttttttttttcctccagcataaattctccatccatctaggatattgcctat

SEQ ID NO: 1302 - DNA, 201 bp, Homo sapiens
ttggggattttcccactatctttgttttttaatagtctaatgagattagggattttcttcatatttttcctacttgagatttataggacttttgaaactayggtttggtatctttaactattttttaaaaaatttcaatcattatattttcaaatactttttgctctattctctcctctccttctaaggctccagttatat

SEQ ID NO: 1303 - DNA, 201 bp, Homo sapiens
agttccaaatattccttagatgaaggccaaatgaactcctttgacttccatcatgatataatcactttggactccagtctttcttctgcctctctcatacrcggtattgggacaagttcatctctaccctcttaactctatatttcacatctaaagataaatttacacaaacatattgactaacaccattggaatctccct

SEQ ID NO: 1304 - DNA, 201 bp, Homo sapiens
agagtcagaggttttgtaggaaaaataacattttaagctcagatctgaaaagatacataggaattagcccaacttagtgattatggattatgggtggacayatcaacaaattgaaagctcagtattaattatcaagggagaaaaggcccaggatcaatggtggggaggggagggtgtgcggggagggaggcagtgcaggga

SEQ ID NO: 1305 - DNA, 201 bp, Homo sapiens
ttgggggcgaggcatacgtgtgcgcatgcacatgtgtctctgtatgtgagtgtgagtgtcgtggccatggttgtgacagtgaaagtagttagctgttaagraagaaaaatgacctttgtctatattgtggatggtcatgtgcagcataataaagtacatatacaaatcatatttaacagtaaattagtggtgtatccaata

SEQ ID NO: 1306 - DNA, 201 bp, Homo sapiens
gcaggctattatctaagttgcagtggctcaattaatgcctttgggtccttacgatatacactcagatatgattttagaagtatctgcaactcagactggascttatggcaaaaagcccatgaatgctgtccagcagtaaccactgggaccatgggccagacaagaaagtatagaacacatcattagagagacgattattgg

SEQ ID NO: 1307 - DNA, 201 bp, Homo sapiens
ggacatgttgatggtcatcaaaagaacttctttcaggatcaggagatgactggaaccagcaagtggatgtcccagcatgcttgtttgaggtggctatctgrgtccccaaaataagtagatatgggagatattggccgggcacagtggctcatgcctgtaatcccagcactttgggaggccaaggcgggtggatcatgaggt

SEQ ID NO: 1308 - DNA, 201 bp, Homo sapiens
ctctgggacagaaatcacagaggaaggagtaggcagccatctttgctgttctgcagccccctctggtgacatctccaggtgtgggagggatccaaacgcayagggtctggaacgggcccccagcaaactgcagcagccctacgggagaggggcctgtttttttgttttgttttgagatggggtcttgctctgtcacccagg

SEQ ID NO: 1309 - DNA, 201 bp, Homo sapiens
ctgcacgcctcagccacttggacatagcaagatagcagataaagataaactctgtgagctttaattcaagaaggaaaacaggaatctactggaatcatgamgtacactccagatcccagagaggagaaggccagcaaacagccccactgacggcatccagctgataaaagttaagtgaagccccagtgcatgagagaggca

SEQ ID NO: 1310 - DNA, 201 bp, Homo sapiens
tgagaattctgaggttagggaaactctttgaaacagagttcaagaagagctacttagaaataaagaaacaaattcagatcatgatagccataaagcagaayctgcagaagggagcatcaaaaaaccaagggcagttttgcatatttaccaatttaatctactatttcaaaaaagctgaagcactagtcttatagtagtgac

SEQ ID NO: 1311 - DNA, 201 bp, Homo sapiens
cacacaaaaccaactcaaaatggatcaaagaataaatataagacatgaaactacaaactcctaggaaaaaaccacaggagaaaagcttcataatttggtcyttagaaatgatttcttgatgctgacaaaagcagtaatagatgagtagaagtatatcaaaataaaaagcttctgcacagcaaacaacagaacaaaacagaa

SEQ ID NO: 1312 - DNA, 201 bp, Homo sapiens
gctttgagggtagctcccaggaaaggctgcctcagccccagcgtgatggggacgggtaggggccgatgaggcttcccagagcagcgatggccttaggtatygccagaaggaaacctacttttcctccaagatcagagggaaggatgaggtggggtgttggagcatcaccatatatatacatcacacacacagggaaacact

SEQ ID NO: 1313 - DNA, 201 bp, Homo sapiens
aacactactgatgtttatccagccaacaaaaaagtataatagcacaaagactgccttctgaatactccctagaggccaatcagccaggtgtgagaattctkaggttagggaaactctttgaaacagagttcaagaagagctacttagaaataaagaaacaaattcagatcatgatagccataaagcagaacctgcagaagg

SEQ ID NO: 1314 - DNA, 201 bp, Homo sapiens
taagaaagtagaacccttcacatattagtgctaggaatgtaaactggtaacatctggacaataaactgactttataaatgatttatataatcaaaacatartaaaagttcccttaaagagtaaaactgagaaaaagtggctacagcctttaatcgcaccgaaggcccctacagtgacagactatgagaagaggctaacagt

SEQ ID NO: 1315 - DNA, 201 bp, Homo sapiens
actatctttttgaaaaatttaaatcaggagggaagcaattcaaaatttaattaagattggaagttctcaaacccctttacagttctcatactctgttcttytcatataaataaaaagcctattttggtaaaatttcattaaaacccatattgattaaatatgaagtaatatctttaattatcagaaaaatgagggatatat

SEQ ID NO: 1316 - DNA, 201 bp, Homo sapiens
ttataaatatgaatgaatgtataaacatgaataaaaatactgtagctcattgaacaaagcagcaagagccatagagttcttcaattcatagctgtagctamaaaaacagaaattaaaagtgtgtacaattattttttgccatcaactctttcagctatgcatagaaaagattattttcaaatgacaaaaaagcagttagag

SEQ ID NO: 1317 - DNA, 201 bp, Homo sapiens
gttattaatagatacacaatacatgtctgtgaaaaaaatgaaccaatcagccaatgtacccttgactgcaagatcagaaatttttcccttacatggatcaytgactcataatgtttctacaaaattggtgaaaattatggttaactaagatttgttctgcatacaccaaagtcattatttcaagtaacataaaacaggttc

SEQ ID NO: 1318 - DNA, 201 bp, Homo sapiens
ctgaaaagggaaatggtccttcccctcctttaaatgccaagtggcactcctccatagatgacatagctggtaagctgcatatgcaaaccatgctggattarcttcatggtcatcaggatgtttgttcatccttaatatgccctttaaatcatggtaaatactgtgactgaaggggccccgctaggcaggcatctgatataa

SEQ ID NO: 1319 - DNA, 201 bp, Homo sapiens
aagaaacaaaatctgaagtatctaagatcagcaaaaaagaaatctcaggtactaatcctggctctatacctaacttgaaatatggcctcagttttgaaatmtgtcagatgaatggatataagactagagaggccaccaacagtggctcctgcctgtaatcccaacattttgggaggccgaggcatgaggactcctgaaggc

SEQ ID NO: 1320 - DNA, 201 bp, Homo sapiens
ataagtgattcaaactcggtttaaactattagtttcatacacctcataacttgtagtactcataatttctgataaatttttataaactgtactcctacttytcacaaacttcttctcctcataatttaagaattaaattggaatacagcagtatgtgaatcatgaagcttaaataaatttgtgtatctatacattaaaaca

SEQ ID NO: 1321 - DNA, 201 bp, Homo sapiens
ttattgttttatctttttcttaaaaaaaatacagtagccattctaacccactaataagggctaacctgaattaaacaataggagtaaaaaaagatcacggyttttataatggtaaaatgaaatttgtaacattcaaagacttattttcttgaattttttgttatattattgcattttttagcttcaaatttcccttgtatc

SEQ ID NO: 1322 - DNA, 201 bp, Homo sapiens
ctaattaattctgtggattacagaacatacaccatataactttcatcttccaaaatgtactcagaattattttatgaccaagaatatgttatgtgtatatrtgtgtgtgtgtgtgtgtgtgtgtgtgtgtgtgtgtgtgtgtgtatgttgggtgtgtgtgtgtgtatatatatatgttatgtgtatatatatatacacata

SEQ ID NO: 1323 - DNA, 201 bp, Homo sapiens
actcccctctcctcacagcactgactcttgccttctcatgttcttttccccttggtgggcctcgccccacacctggcaccctctctgcacagtcccctgaycctgactgtctatccacagttcctctgaccatccgctgcttcctgggctgtgagctgcctcccgagggctctagagcccatgtcttcttcgaagtggctg

SEQ ID NO: 1324 - DNA, 201 bp, Homo sapiens
ctccttgggggcctattcttcgggctaactctttgcatgttctgcagggagccaaacaagccgctcctacacttcgctggtcctgggcgtcctggtgggcrgtttcatcattgctggtgtggctgtaggcatcttcctgtgcacaggtggacggcgatgttaattactctccagccccctcagaaggggctggattgatgg

SEQ ID NO: 1325 - DNA, 201 bp, Homo sapiens
ataagcactgaatcgacattggctatgattatttttgattaatgaaggggagggggttatggcactggaagattttaagtaggaaaaggacatgatctcayccctgggtcaggtggaggtcggaatagagaacggggagatgaagtagaaagttactaccccagtctagatgagacggatgaatcctgaatcagggcagtg

SEQ ID NO: 1326 - DNA, 201 bp, Homo sapiens
acagggcggaaagtgggaatcactagctgatttctccctgggacctagcggctgtgtcggagcaagtcggggtctgggatggacggaaagggaaaggaccsggttcacgcttcccattccccaactgcgaaagggcgggtcacagttcacctgtagtgggcgggatctggcgcggagccgtcgggacctggcgcaccatgg

SEQ ID NO: 1327 - DNA, 201 bp, Homo sapiens; identical to SEQ ID NO: 236

SEQ ID NO: 1328 - DNA, 201 bp, Homo sapiens
ctgagagagagaaagacacacggtcccaacgggaaggccgatggccaaagaaggatctactcacccccaaccctgactgcccagggagatgcagggcaggygccccagtgcttcttgggaaacatgcagaccctgagagggaagggcaatgctggatcatggccagccttcctgtacatctgcatagtagagatgcatctc

SEQ ID NO: 1329 - DNA, 201 bp, Homo sapiens
atttttctcagcaaaacaaaagccctgtagtttttcttatttccttaaacatggtgttttatttcatccaaatgcaagtgaagaggagattagatttggtytgtggaattccagggaacagattaatgaatgagaggaagtcagagagaaataaatgttagtttaatgtaactttctgacccagcaattcaataatggaac

SEQ ID NO: 1330 - DNA, 201 bp, Homo sapiens
cccagtccagttctctgcccgccccacccaagtggcacccaagtgccttctggttcaagacgagaactggacaaccagccagaggcagagatttcctctcygggcctaaaggtcaaacaactccagagcagcctatgcgtcaccaaactgtgaacaaaggtgtcgacacttccaagaaccacagggtctagcaactgtgtc

SEQ ID NO: 1331 - DNA, 201 bp, Homo sapiens
ggtagggctgagtatctttgattccaaagcccatgctcattccatttgtcactctgtctgtctcccagtcacctgtcatacctggggggaaggggtaatgrtggttattacctttattttactaatttatctatttcaacttattatgcaatatgtagaactttttttttttttttttgagacggagtctcgctctgtcac

SEQ ID NO: 1332 - DNA, 201 bp, Homo sapiens; identical to SEQ ID NO: 848

SEQ ID NO: 1333 - DNA, 201 bp, Homo sapiens
tttcaggtccaggtacctcccaccccttcaagggactgtctgatactattctatggctcctggaatgaagaaccagtcatcaggacctgctggcctctatkaaattaagagtccagtcagatttaacaacctgaagatgaggtgtaactgtgaagcaatatatggctgattttttaacacacccatccaaatacatccact

SEQ ID NO: 1334 - DNA, 201 bp, Homo sapiens
ctctctactgcaatctgttccacagtcgtatagccaaaatcctcttgctctgtgtctgtttattcaacaaatatttatcttaactgactctaatcacattstctcctgtttgtcctgcagtgaagcccttttacatctgcttatctcttttgatccaagggaaggagacttaaccctgacttccagagaaggaaatagtct

SEQ ID NO: 1335 - DNA, 201 bp, Homo sapiens
gttattagacataatgttattgcacatttattagactataatatagtataaacataacttttatttattattgtttttctttttagacgaactcttgggcrtgatagtgcgcgcctgtaatctcagctattcaggaggctgaggcaggagaattgcttgaatccaggaggtggaggttgcagtgagctgagatcgcaccac

SEQ ID NO: 1336 - DNA, 201 bp, Homo sapiens
accccaaaaggataaaagcaatgaaaaccccacccaccctaatcaaacttctgaaaaccaaatattaggaaaaaaattttaagagtagccaccaaaaaatsacatgttacatatgggggaacaataattcttatgactgtagatttttcatcagagaccatggaagccagaagacaatggaataacacctttaaagtgctg

SEQ ID NO: 1337 - DNA, 201 bp, Homo sapiens
ctgttttaggacgtgggaatagagcaatatagcagagaacaaaaacaaagtctgtcttagaagctacagtttactgggagggacagaccctaaacaaatawtttttttttaatgtcagagataattagtaggaaataggtagaaaaataaggaaggtcgaagggagaataactgagttgctgttttagacagcataatcag

SEQ ID NO: 1338 - DNA, 201 bp, Homo sapiens
gatgttattattctcatttcctggcaacgttattattctcacacccagtaaaaagaaaccaaaactctatttcttctaatatctcttggtatatccgatgrtctgttgtatgtgtactggcatataacagggttctcatgggtagccttaatcttgcatcacactcactataatcaggatttctacatatcccaaaaaata

SEQ ID NO: 1339 - DNA, 201 bp, Homo sapiens
gaagtgaggcagggcaagggaggcggcatttaaggggtatgccatcaggcaggtttccaccatgggaactggagttcaatcttgctggggagcttaggaaytcagtgtagagctccagcttcggagtgatcccacccaaggggcagggaactggaatgtttatccaccaactcccatcagtatcagttaccggcttgagag

SEQ ID NO: 1340 - DNA, 201 bp, Homo sapiens
gacaaattatgatcccggacaggagcagggggatagggatagttctgatacacgcccaaagcctgggaccttagccagcacttccctctttctcctgggtrtcctgctagagtctgagccagagaaagataaatgtcataactggagggccctgagcagccacccagcccagatgctgtcaaacactgctctgcataacct

SEQ ID NO: 1341 - DNA, 201 bp, Homo sapiens
gggctgagctcagcgatccagcccacccggctaatccaggactttttttttcactgcgagaggctaagtggatcctggaggtgatagtaagaattgcgggragcgcggctctagctcagctgggagctttctggtgccggtgaggagaccatgaagccaccagccccagctgacccgcccgccgaggcccagagagtcaga

SEQ ID NO: 1342 - DNA, 201 bp, Homo sapiens
tctccattccccttattcccaagtttctaaaatttggtcagcaccttagaccacagcaacacccatgactttggtcagtgtgacatgcggtagaaccaacmctggatttgaagtcagatctaggatccagttaattacaactctgtcactcatctataacctgtgtatgtgaccctctccttctctggggctagcatcctt

SEQ ID NO: 1343 - DNA, 201 bp, Homo sapiens
ggctggcggggagaggggtggttggtaaatgggaaaagggtgcttcctttgctgatatccaaagcagatactttctctgcctatttgatgatacaaaactmgccctaccacaccaggctaagggagagaagaggatccgtgtcctacagaattccccctattagcctacctgccccatagcccccaaactctgctgctaat

SEQ ID NO: 1344 - DNA, 201 bp, Homo sapiens
ctgcctggtagagaagataatcccaaaggttatgatattattactctgtaggacattaacccatttagtatttaatttagcaatcttacttcaatattttycttttccattgactataaaaactcaagttcttttttcttttttttgagacaggtctcacattgttgcccaggctggagtgcagtggttcgaacacggctc

SEQ ID NO: 1345 - DNA, 201 bp, Homo sapiens
gactggtcttgaactcctgacttcaagtgatccatccactttggcctcccaaagtgccgggatttacaggagtgagccactgcgcctggccaagaattacrtttttaacatgctgacagttgtccttgacactaagtgtcagaccctggattaagtaatttatagacccatgatactcctttgagatagtttttgtcccca

SEQ ID NO: 1346 - DNA, 201 bp, Homo sapiens
caaaacttcatcaacgtgataaaaaagattccaaaatttaggtgtagacgttcaaatattcaaaaatagctaagacactcttgaagaacaaagaggaaagrcttgatctacaagatataaatacattatgaaataatactaatcgagggccaggcactgtggctcacgcctgtaatcccagcactttggaaggccaaggca

SEQ ID NO: 1347 - DNA, 201 bp, Homo sapiens
tcaggaaaccaggaggaatggatttggctgaaactggaatacatggatagataaggctagagagataggcaggagccaagccaacaatactaggctcccaycaattgctggggcaggcaagagcaggcatcatcctgagtgtttggagcttcttttcatgttccctaagttggggggtgttggggggatgatacaggggga

SEQ ID NO: 1348 - DNA, 201 bp, Homo sapiens
aaggagcccagtcttttcttgggaagataaaacatacaaaagagaacaacacaaggcaagatgcattgtataactagaagaaacacacaaataaaaatgtkatgttatgtggccgggcatggtggctcacgcctgtaatcccagcactttgggaggctgaggtgggcagttcacctgaggtcaggtgttcgagaccagcct

SEQ ID NO: 1349 - DNA, 201 bp, Homo sapiens
tttgtactctttccctttatttctcagaccagccaacacttagggaaaatagaaaagaacccacgttgaaatatcgggggctggttcccccaatacccttsttcatctttgtatccttagtatctacaacagtgccaggaatttagaagttagtcaataaatggctggatgaatgaatgaattgaagagttttgaggaagg

SEQ ID NO: 1350 - DNA, 201 bp, Homo sapiens
agccactgcgcctggtcttctcactcattcttagacccagtgcaatctgacttctctataaactactctgagatcaccagtaacctctaattgtcaaaccrtcaccctacatggtatctgcaaatttgcggactagaactctctttttgccttaacttctgagataccatacttcaatttttaaaactgttctgtctactt

SEQ ID NO: 1351 - DNA, 201 bp, Homo sapiens
cccagcatgtgattccactatctgaagacacagacgtgctttacgtatttccataaattaactcaataagaacatccaccaagaagctgacagagtggttmtaaggagagaaaccgaatagctggagacaggggcaaaaggggacttcaccaatgtcactgagtacccttttttgtatcctttgacttttttttttttaat

SEQ ID NO: 1352 - DNA, 201 bp, Homo sapiens
attgctagtgtctaagggcctggcgggtaagatgtatttattcaacaggtattaatctattacctaccacatgtaaagcactgtggggaacataagatgartaaggcatggattctgcattcaatttgtagagctgtaactgttgatgagagctaactgcaagaaagatgctgaaggtcccaaattctgtagaaggatcaa

SEQ ID NO: 1353 - DNA, 201 bp, Homo sapiens
ttaacctttatttactccctcttatttatccccatctaccaactacagtatctataaaacacattcactcctttctaccccattgcttttgttcaagataycataattcctctctttctttgtggtaaacatgaaggtgtaccatccagttctacctccaaagaaagacttcctgttggccgggcatgatggttcacgctt

SEQ ID NO: 1354 - DNA, 201 bp, Homo sapiens
atctaggatccagttaattacaactctgtcactcatctataacctgtgtatgtgaccctctccttctctggggctagcatccttgtctataaataatgagkagtttgaacaaatggatctttaagatccttttcggtcgagctttctatgattctaggattggctatctcttatttgctgaaaaagtcagatggaagtgat

SEQ ID NO: 1355 - DNA, 201 bp, Homo sapiens
gccctcactaattccacttaagacctccagtttctgtcctaggattggtgacagcagaagaaaacactgagagctagaaatcatctagagacttcataccragagactggttaagtaaattcctaggtcccaattaagagtcacgatgttgtcatttaaatggacacaatataaagaacgcaaactacgcatagaagtctt

SEQ ID NO: 1356 - DNA, 201 bp, Homo sapiens
cttttatggatcatatgtctggaatataagtttcattgcagaaaacatacaaaataatggggaaaaatagaactctgccatccagaggtgacagctgttamgtggtctagaggttcgatgcaaataagggctgtgctggcttcacaagaatcactggaagtctgctaaaaatactgattctaggacccaacacagagattc

SEQ ID NO: 1357 - DNA, 201 bp, Homo sapiens
gggaggcagtataagattgcagcttaaagcacaggcctttcaccaattttcacctctaggaatttaattcacagtgaacagctgtttgagagtgttcatgrcagtattgcttagaacagcaagaggctggaaagaacccaactgtccacccattaatgggtgattaaactgtgttataaacagtgcaaaactatgagttat

SEQ ID NO: 1358 - DNA, 201 bp, Homo sapiens
tagtttatgaagggtcgagaaggcgggcggccagcctcgaggtagggggttattatcttccgctgcccgccgccccctcccacgccggcccaggctgaagytgactctgcccgcaggcctccaaagacttcatatgctccagatctcctacttccgcgacccctatcacgtgtggtaccagggcaacgcgtcgctgggggg

SEQ ID NO: 1359 - DNA, 201 bp, Homo sapiens
aatccatgggtcagagaaaaaatcttaaagtaaatcagaaaatatttgaactgactgaacatcaaaacaaaacatatcaaaatttatgggttgcagctaaygcagcgtgtacaggaacatttatagctttacatgcctatgatagaaaaaagaaaggcctcaaatcatactctaagcttctaccttaagaaactagagaaa

SEQ ID NO: 1360 - DNA, 201 bp, Homo sapiens
agtccttcgccattattgaattgggtcataggtctttttcttattggtttataacagctgttttacgttaaaaaaataataataaatattttacctagttyatagtttgttgctttatttctgctttttttttggccatgcagatgaaggcctgaatttttgaaacctaagtgaactgttactgctttcactgtataccag

SEQ ID NO: 1361 - DNA, 201 bp, Homo sapiens
ccaactaaacaaggaagaggagggggatggggagggggacaagaagaagaaggagaaaatagtcacgtgtattgataatagcgaacatttacatagcaagwaatgttctttgtactttacatccatcaacaccattaatccttaccacaaccctctgagaaagtgtcattatcaccattttataaaccaaaaacctgaagc

SEQ ID NO: 1362 - DNA, 201 bp, Homo sapiens
tccctcacccactggggctgcaccagcactggccccagctcagcttcctgtctcccttatcttcctccagcatgtgctctctggagtaggaaacaccaccrcttgcttccttcatttccctttgctcaacgggaccctcattctttaggtctcagtcaaatcccagctgctggcctggtgcccactctgtgattttctaca

SEQ ID NO: 1363 - DNA, 201 bp, Homo sapiens
agtgatccacctacctgggcctgccaaagtgctgggattacaggcatgagccaccacacctggcctgaacacgcttatactaatggtgaaataatgttggrtagctgtaagtggcttgcccaaagttccacagtgatgtggtacaagaactggcactagagcttgggacttctgacttctgatcctgagctattgctgcta

SEQ ID NO: 1364 - DNA, 201 bp, Homo sapiens
ctaagggataatccgttccttgcctctctagattctcctgactgctggcattccttggcttatggttgtatcactccagtatctgcccgtgccttcatatygccttctctgtggatgtgtcacatctccttctgcttttctcttataaggacatttataattgcatttaggaccccccccgcgccccccccaacccagata

SEQ ID NO: 1365 - DNA, 201 bp, Homo sapiens
agagtggcatggggtagattcaaacagcctagcaaagactctgaaaatgaactgacactgcaaccacccacagcaggtgagacaaagcttgtagtctgaamctaattgagttatttgcctgctaaaataaactagtcaccatccagataatttaaacaggactcagagtcccacaatctaacactcaagatgggcaagata

SEQ ID NO: 1366 - DNA, 201 bp, Homo sapiens
cttgtctaatttttgaagctaggcagggtcaggcctggttaggatttggagggagaccacctgggaatactgggtaatgtaggctgtcaattaaaaaaatktttttaaacaatcagacacctactatgtaccgataaaattttgtaataaaaaaattcaaaaagtaaacgagaataaataagaataaagaatgtgatgttg

SEQ ID NO: 1367 - DNA, 201 bp, Homo sapiens
tgactcctgcttacctcctcatatcacttcttccttcctatcacctactcctatttggccatacttaagtattactgctttctcaagtatgttatattctytctcctttcctattatattcttttgtaccttcttcaccctgtacttgaaacaactttttcctcacccctacttgccccttaggcattatcggggtttttt

SEQ ID NO: 1368 - DNA, 201 bp, Homo sapiens
cacctcagccacccaggccagatgcagtgtaggccatggctccaacagcagcatttctcttttcttccccacccccatccctgggtttagaatgagaaaakgctcaagttgcccccctcccaacttccctacccgcaacactctttttattttctctgttcccagctccatacttccatgctttttttttttttttttttt

SEQ ID NO: 1369 - DNA, 201 bp, Homo sapiens
gagcaagactccatctcaataataataataataataaataaatgagcataattcaccatattggcagactaaggaagaaaaaaacacatgataatcctaamtgatgaagaaaatgcattaacaaaatttaaaacccattcatgataaaaaaaaaaaaatctctcagcaaactagagaaggaaacttcgttaatccaaaaat

SEQ ID NO: 1370 - DNA, 201 bp, Homo sapiens
tgtgtattattatccctagatcaacagctaaaaaaaaaaaaccacaaaagatatagacaaccaatatattaaattggaatataaaacatattcaaataatycaaaatataacaggaaaggggacattgagaggcaaaaaaatggaggagacaagcagaaaaataacaaattgtagaccaaaatccactcttatcaataact

SEQ ID NO: 1371 - DNA, 201 bp, Homo sapiens
ccgtcagttctaggaattcatgacacttctctcctcccaatttgggatgtggttacacaatcatggtcccttcagtctccatctcaaaccggaagctttayccctgtcagccctgtagaatgtcttgggtaagaatgaataccctggttgggcgcggtggctcacgcctgtaatcccaacactttgggaggttgaggtgcg

SEQ ID NO: 1372 - DNA, 201 bp, Homo sapiens
tggggccagtgggccctaatgagattgcacctccattttaaaagcgtgaaaggtataaggagattcagagataggtgtaaatggcttgcgggagcctccamaattttcaggtccaggtacctcccaccccttcaagggactgtctgatactattctatggctcctggaatgaagaaccagtcatcaggacctgctggcctc

SEQ ID NO: 1373 - DNA, 201 bp, Homo sapiens
caggtattctctgacccacttaatgcacctgggagggttggctgatgtagctcaattgtaattaaatacatcacctatagtctggcattctcctctaccaytgggaggcagtataagattgcagcttaaagcacaggcctttcaccaattttcacctctaggaatttaattcacagtgaacagctgtttgagagtgttcat

SEQ ID NO: 1374 - DNA, 201 bp, Homo sapiens
taggcaaagaagatgccatgtgcaatggccaggagataagaaatccagggctacatacacagaatgcagcacgcttcagttggcttttgcaagaaggcatsaagtgctgtagtgggcatgaagtgggcagtgtaagtccatagtgactctgaattcagaactgattctgcaggcactcaggccaggcgtggtggctcacac

SEQ ID NO: 1375 - DNA, 201 bp, Homo sapiens
atctgaatgacaagcagcagccagtgatgggaggaaaatggggagtgtatttcaggcacggggcacaccaactacaaagacttaagttttaggagtgtcasactccttcctggatctgaatgcccacctacataatgaaaggggtgggttttctaattcttggagcccttccacggtatctcgttactccagaaattgcct

SEQ ID NO: 1376 - DNA, 201 bp, Homo sapiens
gggcaacaagagtgaaactccatctcaaaaaaaaaaaaaaaaaaaatgataagtaaaagaagccagtcacaaagaaccaggtattatatgattcaacacaygtgaaacatccagaataggcaatctgaccaggcacagtggctcatgcctgtaatcccagcaatttgggaggccaaggcaggtggatcacaaggtcaggag

SEQ ID NO: 1377 - DNA, 201 bp, Homo sapiens
gagacaggggcaaaaggggacttcaccaatgtcactgagtacccttttttgtatcctttgacttttttttttttaattgttcagtctctgtagagactgtkaaaaattggcaatgccggccaggcgcggtggctcatgcctataatcccagcacgttgggaggctgaggggggcaaaatcactggaggtcagaagtccgag

SEQ ID NO: 1378 - DNA, 201 bp, Homo sapiens
caactcccaaagcagggcttgcacaatacatacttttgacttgccaaaaaataagtttatccctgggaaatttcccatccatctgttgctttgtagaaatrcttgaactttgcatgcagtatgtccaaacatttcgatcgactccctggttagagtctcagacctcgttattattattattattatttgagatgagagttt

SEQ ID NO: 1379 - DNA, 201 bp, Homo sapiens
aataaaaaagagacctgacaatgaggctcttacatgcatggaggcagattcagagtctgggatcctatgttgatgtggccctcactaattccacttaagayctccagtttctgtcctaggattggtgacagcagaagaaaacactgagagctagaaatcatctagagacttcataccaagagactggttaagtaaattcct

SEQ ID NO: 1380 - DNA, 201 bp, Homo sapiens
catcttgcacctcaaactctgtctcagcctctgcttccagataacccaacttgtgtgtgtgtgtctctctctctttcaaaattgagaaattttctcaatcytgtctggaccatggcagcagcctcctcctaagaaattgcctctaatttctccatattttaattcatcttctacatggcagtaagaaacacagatctaatt

SEQ ID NO: 1381 - DNA, 201 bp, Homo sapiens
cagaatggataaacaaaatataatacactatttgcaaaagatgtatctaatcataaaactacagaaagatggaaaggatagaaaaagatacatgggaaaakgtcaaccaaaagaaagctggtatcacttatattcctatcagaaataaaggtataagaatgaccttcatttacagatgacaaactgggctcagaagctggg

SEQ ID NO: 1382 - DNA, 201 bp, Homo sapiens
tccaaaatataacaggaaaggggacattgagaggcaaaaaaatggaggagacaagcagaaaaataacaaattgtagaccaaaatccactcttatcaataamtacattaaatgtaaatggtctttaaaaatgtaaatggtctaaacacaccaattaaaagacaaagatggctgggtgcggtggctcacgcctgcaatcccag

SEQ ID NO: 1383 - DNA, 201 bp, Homo sapiens
ctatttcattttttaaaaatggtaaccatgacctgctaaattgatttcattgtccactaataaattatgacctcagtttcaaaaagattgctttaggtaascaatcatcttctgagatttatacagattgctcataattctctcctattttttaaaaacatgctgcagtgaactgctttacactcattttatgactacttc

SEQ ID NO: 1384 - DNA, 201 bp, Homo sapiens
actctggggtaaagatactgcttccactactagtgcttaaggaatgatcagtaggactgaaactcacaggagaccgtaagctggtcccctgggtccttctrgctcttggaaaagttttacgacctaaaaaatgaaaagagaatgaccttataccttttattaatatgttatacttttaaagtatttaaaatttgtaatgta

SEQ ID NO: 1385 - DNA, 201 bp, Homo sapiens; identical to SEQ ID NO: 1013

SEQ ID NO: 1386 - DNA, 201 bp, Homo sapiens; identical to SEQ ID NO: 1014

SEQ ID NO: 1387 - DNA, 201 bp, Homo sapiens; identical to SEQ ID NO: 1023

SEQ ID NO: 1388 - DNA, 201 bp, Homo sapiens
tcagcacttctgacattttgggaggggtaattctttgaggctgctttccttgtgtattataatctatttagcaacatccctggcctctacccaattcatgytactagtatccctccaattgtgacaaccggaaatgtctctaagaattgccaaatgcctagtgaaatcatcctcgctccacttttggcaaccactgtttca

SEQ ID NO: 1389 - DNA, 201 bp, Homo sapiens
atgtgggctggcatgagagtattgaacccttgggagatctagacacaggtgagctcacacctgctctaagtcttttctgtggacctctaccatgcactcayaggagcaggagacaccagggaaagcctcccttggtggtcaaggcctggaaaaggggaatggcccactgttgtgggaaacgcagaaagtccttccaaaccc

SEQ ID NO: 1390 - DNA, 201 bp, Homo sapiens
cctggaggggtgcctggtgcagcagcttaggcacttgcctacagacctaatgtgatcctgcctgtgttctaaggttacctattacaaaccgtaaaatgagkactaagagtcatgaacaagtcccaggttatctacattacactaaataaatcagataatgttttctggcttggtgaattcatttcagtctcattcatgaaa

SEQ ID NO: 1391 - DNA, 201 bp, Homo sapiens; identical to SEQ ID NO: 1026

SEQ ID NO: 1392 - DNA, 201 bp, Homo sapiens
gagcttgcagtgagccgagatcatgccactgcactccagcctgggcgacagagcaagactctgtctcaaaataaataaataaataaataaataatctccarcaccatgtgagagaccattccttatactcagtaggtttgatagtagggtttgtgtttgtttttaatcattagttctgatttaggtaatcaagatgtccag

SEQ ID NO: 1393 - DNA, 201 bp, Homo sapiens
ggtgtgtggcttatagacccaatcacccatctccacagaaacctggacagttttgactagggtacatagatgggatgaaatgaaggaaggctgttggactyccaggattccacaggtaggaaagggattggcaggggcagttcagaggccagtgaggctgcttccgccaccacaggactgaaagggacaggcttgggtttg

SEQ ID NO: 1394 - DNA, 201 bp, Homo sapiens
acagcttcatctatgacgtatcagataaaaaaggctgaatgtgaatctaatttagacctcagatctaacttggagtttatagtaaaaaagggataaagaarcaaattaaaatccgcatgctcatttcggcagcacatatactaaaattagaacgatacagagaagattagcacggcccctgtgcaaggatgacacgcaaat

SEQ ID NO: 1395 - DNA, 201 bp, Homo sapiens; identical to SEQ ID NO: 238

SEQ ID NO: 1396 - DNA, 201 bp, Homo sapiens; identical to SEQ ID NO: 239

SEQ ID NO: 1397 - DNA, 201 bp, Homo sapiens; identical to SEQ ID NO: 847

SEQ ID NO: 1398 - DNA, 201 bp, Homo sapiens; identical to SEQ ID NO: 848

SEQ ID NO: 1399 - DNA, 201 bp, Homo sapiens; identical to SEQ ID NO: 849

SEQ ID NO: 1400 - DNA, 201 bp, Homo sapiens; identical to SEQ ID NO: 851

SEQ ID NO: 1401 - DNA, 201 bp, Homo sapiens; identical to SEQ ID NO: 852

SEQ ID NO: 1402 - DNA, 201 bp, Homo sapiens
tttgcgtgcctagtcactaatggggtctggctcttggggtgggggtgacacgcaatgtcttgacttcggaaggccatccttccaagacctgccagcccctytcctgttagctttccactgcttgctctctagaaccatcgccctctgctctccctctccccctccaggccgccctccttcccctggcttccagaggcagag

SEQ ID NO: 1403 - DNA, 201 bp, Homo sapiens
tttctggagtgtgtctgcacctaacctttgaagccttggttgccggcacttgccatggggtccctgagccctgagcctgttgagttctgtgcgtgagtgcrcttggtcatagcactcaccaggttgtggaaagaggcctagagcctccgctgtggggaagcctctagctcagatgcctgtggctccttagaggagggctgg

SEQ ID NO: 1404 - DNA, 201 bp, Homo sapiens
gccaagatgccctcacttctgacatcacccgcaagttcagggggttccccaaaccaccctcaggcttgatagttgactaggaagactcccagagctcactsagagctgtggcacatggctgcggctccttccagaagaacacaggttagaattgtccaagggaagagatgtaggcagagtctgggagggtccaaccaggag

SEQ ID NO: 1405 - DNA, 201 bp, Homo sapiens
tgtctagtttcagaacgtttccagtactctggagtactctggagtgaaccccatatggtaggctgtcactccccatttctcctccgccactcagcggccaytggtttcccttctgtctctgtggattgacctgttctagacatgccacgtacctgaggccagacaacaggtgtgcttcctgcctgccttcctcccccagcg

SEQ ID NO: 1406 - DNA, 201 bp, Homo sapiens
gtctcccagtgacaacacccgccccccgccccaccgccatccccctcctctgcctcctcctggccaggcctgcgagaagacccagctggagttcatgtcgsaacagtgcgccaggaccgacggccagccgctgcgctcctcccctggcggcgcctccttctaccactggggtgctgctgtaccacacagccaaggtggggc

SEQ ID NO: 1407 - DNA, 201 bp, Homo sapiens
gcatgtgctgttgattacttgaggcgttcctctcaccttaatatgtgatgcgttgatgtaaccagtgttgttttctttagttgggaccaactccactctcrcatcatcataaggaagaacatcttggaatcgatttctttctgcattttcagggagtcgtgctgttgagcactccccatcaactagccgtttcttaagaat

SEQ ID NO: 1408 - DNA, 201 bp, Homo sapiens
tctggagaatattcagttttttcaacctgtttgttggtctgaaccagtgttgcactggtattatttcagtaaaactacaaaaccttaccaaaatcctttcrggacacttaactctaagattaaattacatttcaataaatattaatcactgtaagtaacaaaatatttgtctcattcaatggtccattaatttcaagtgat

SEQ ID NO: 1409 - DNA, 201 bp, Homo sapiens
tacacccaggcccctagcagaaaccgcttcccatatttacaaagaaagcaggttcctcctccctgtcagtgcttacgaaaatcccatcaccagaccagcgrtggggactcggatgcaaacatggtgcaggggaaggcagagaagagacagggactgggccatacatgcaaaccactggccagctccccgtccgggtgggca

SEQ ID NO: 1410 - DNA, 201 bp, Homo sapiens
aaagttaaagtcactcacataaaaatcccttgaggtcttctggacagccatgttcaggccagtctgtgtattggaggtgccagacggtcctctcttgcccrgtaaggaggtgcttcatcttcaggcctgtggtggcatagcagccagagtctgtgcggaaccgggtcgtgatcttaaaccttccataggtgacagtgttgt

SEQ ID NO: 1411 - DNA, 201 bp, Homo sapiens
atacttccttccaagatatctttcttcagttgcagataatactgatacctataaaaaatgtcagttgtataaggtcaatgtcaatattatctcattgagayacaatgcatttaaccataatttggtagagaagcataaaccagtgaaataaaaccttaatcccacatggttgtgtgtgtttttttttttttttttagatag

SEQ ID NO: 1412 - DNA, 201 bp, Homo sapiens
cttgttgtagtaccagaggctgaagtaagtgacctggaaagacagaaggtcattgaaggaggcaataacatacaaaaggatttcaatgacttcagtcgcamtaatccctgacctgtgaccaaatgacagcagtctcttattgcctttcttctcagagaagaacaacagcaaaaactgaaggaaaaaaaggaggtaagacct

SEQ ID NO: 1413 - DNA, 201 bp, Homo sapiens
ttggacgacatcggcgagggctgcaagtagggctgaggattatttaaggagttggtgctgtgtgcactgtagacactgccattacggatccgaccgttgargtcaatctgggctctatccaagcttgtctgagagtgacagtagtatccgttctggttgggcacaaagaggttatctagaaaaaatgagttcaaaatgaga

SEQ ID NO: 1414 - DNA, 201 bp, Homo sapiens
aaggcaaatttctgaagaaagtcctgggattcatactgatcaaagtcaccaaaatccgctatatagaatgacaaacattcacgttaattatatttaaattkcattgcaaaatatgcacaacaaaattcaatacgcagtatatctagatggtatgctaatatttcagaagtcaaatttgttatagctatataaagtatattt

SEQ ID NO: 1415 - DNA, 201 bp, Homo sapiens
acttagggttagggaatggcagacctggagaaaagggttccgctactaccctcggctttgccaaacttaacattttgaaattccattccacaaatgtgtaytgcgtctctgggaacaagacagcgtaatgagcatcgtgagaaatctaagacgaatccctaaaccgtcgctgtctttaaagagattacaaccatgctataa

SEQ ID NO: 1416 - DNA, 201 bp, Homo sapiens
atcttgtaaccatccctgaagaaaacacacagtggtaagtatgtgacaattcaccccaatttcttagaaggaatcatggccattgactgttaatgactctygtcactatcaggcaaaattatgactattgttactatatgggagctttgtttacataggtaatcatctttctaaggaattaactggcttctcacaagagcc

SEQ ID NO: 1417 - DNA, 201 bp, Homo sapiens
acttaaactgtaagcgaatataacctcatcaaactcactgactggcatatctttcttcttaaaatatgacctattagcagacaaagtctttgaactagatraatacatagcatagtattaataaatgtatatgtatatagtcatgtgtcaaggatgggaatgtgttgagaaaggcatcatcagattttgtcactgtgcaaa

SEQ ID NO: 1418 - DNA, 201 bp, Homo sapiens
acaaagtctttgaactagatgaatacatagcatagtattaataaatgtatatgtatatagtcatgtgtcaaggatgggaatgtgttgagaaaggcatcatyagattttgtcactgtgcaaacatcagagtatacttacacaaacctaggtggtgcagcctactccacacctaggctatattgtatagcctactacacacct

SEQ ID NO: 1419 - DNA, 201 bp, Homo sapiens
aacacaatggtatttgtgtatctaaacacagaaaaggtacgctaaaaatagtgttataattttatgggaccactgtcctatatgaggtcttttgttgaacraaatgtcattcggcatatgattgtacatatgtgtgtgtatacacacatatatacatacttctatttattgtactgtttgctctgttgacctataacatga

SEQ ID NO: 1420 - DNA, 201 bp, Homo sapiens
cattattctagatgctggggataccgtactaaatggaaatcacagacactctgccagtgcagtctatggagccatctggaatccaaactgtcctccgtatytggtgcctgtgaagtgcaacccagttacagttcatgtttgaattcctctgacagcccacccctttaatcatttcatatgagtctttatcatcttatttca

SEQ ID NO: 1421 - DNA, 201 bp, Homo sapiens
aatcatttcatatgagtctttatcatcttatttcagccacagacatgtaaacctctgttctttattaccaaagaacctgaccaaaacaccatccattcaaktaagaagaatttggatccagcttttctccttccacctgctaacagccaaacccatggatttccctctatagctaatgggatgctggcagttctgggatcc

SEQ ID NO: 1422 - DNA, 201 bp, Homo sapiens
aaataactccaaacattaattagtcatgtattcaacaacaatcactgttcctaaaagcagaggtagtatcctttatttacgacagatagaaatttataaaytgtttccaaaacttagcactccaaatagtttggacaaaggagtcaaccttgtttatcaggcaaagttagttatgaagcgcttcatttcccaaagaaataa

SEQ ID NO: 1423 - DNA, 201 bp, Homo sapiens
ttactgatttatgcatttattatactttttatttagagtgtactcctatttataaaaaagttaactgtaggccaggtgcagtagctcccatctgtaatccyagtgctttgggagactgaggccagaggatcacttgagccaaggagttcaagaacagcctgggcaacatagtgagaccccatcacaacaaaaaatacaaaa

SEQ ID NO: 1424 - DNA, 201 bp, Homo sapiens
atagatatttttgtatagctgtacaatgtgtctgtgttttaacctatgttattacaagagtcaaaagttttaaaaatttaaaagtttgtaaagcaaaaacrttatagtaagctgaggttaatttattatcgaaggccaggtgtggtggctcatgcctgtaatcccagcactttaggaggccgaggtgggaggatcacctga

SEQ ID NO: 1425 - DNA, 201 bp, Homo sapiens
gtttttaaagagtaaactaggattaaaggggaaattttagtagtcacgtgtcccttaacgatgtgggaatgcatcattaggctatttcattgtgtgaacaktatggagtgtacttacacaaacctaaatggtatagcctcctacacatttagggcatgtgatatagcctactgctgctaggctacaaacctgtacagcaca

SEQ ID NO: 1426 - DNA, 201 bp, Homo sapiens
cagtggatcccttaagcccgggagtctgaggttacagtgagctatgatcacaccaccacactccagcctggaagacagagcaagaccccgtctctttaaawaaataaataaataaaagtgttagatggtggaaatacctagcaaatgtttgtctcaatgacttacaccttttgagctcactatagtaagggtaaggaagaa

SEQ ID NO: 1427 - DNA, 201 bp, Homo sapiens
ctaactcttaaagtgattgattactgtggagatgtgtgatgacagattggcacctactaaggaaacctctcttgcctggtacattattaaaaataatccartggggaaataggactaatttaattacatgcctttatgcagtaagatccacagttgaaaaatagaggcagtagctttaattgcactgtaatgttcacacac

SEQ ID NO: 1428 - DNA, 201 bp, Homo sapiens
agagacagggtctggccctgtggtccaggctgaagataaacttcttaagatgtggaaatactcatctgcataaacctccttagcatttggtatagccccayacagagagagtatagagtaaatgttaattgactgcttaaacttcagcttgggggtttgttataaatacaattccttatacttctcatgtgaaaactgcag

SEQ ID NO: 1429 - DNA, 201 bp, Homo sapiens
aaaaaaaaaaaaaaaaaaagaagagtgtcagtgtcaggatctgattcaggttaaactaagatcattctggctgacatatggaaaataagctacaggcagcraaggcacagaaacaggaaagtcagaaggctacctcagtattctgatgagaagtagtggcagccagcactaagctgttaacacgagtggtaaaaatggtca

SEQ ID NO: 1430 - DNA, 201 bp, Homo sapiens
aagaaacacccaggaagcagatgcagaggaactgctgctagagttccctggactggtttcccagatgtagaaagttccgaagacctacagagtaactattmaggaagacaaaagtctgaatgagatctatgatcttataggtaagtataaaaattgaaaaagtttggccctccttaggaactctatttcaagaccatttca

SEQ ID NO: 1431 - DNA, 201 bp, Homo sapiens
cctccttgcccctaatagatctgcacttcctttcacatttcctctctgttatagccccaccatctactgaaaacctgaatatcaaccaggacccatgctawcccttctctattactcggtaggtcctgatccagattccaaccacctctctccaaccctatccaactccaggtggctaccatctgtacctgaaccactccc

SEQ ID NO: 1432 - DNA, 201 bp, Homo sapiens
ggcagggtggaattttatctcagagttgtgctaggctcagggtcagactccacccttcactgtatcctacaaatagggatagcaaactgggccatcctcargattaaatgagataatagccagcactactataatcccaaattttgtagttagtaattgtgatcctcttcctattttggataaggtgttgttttttcatag

SEQ ID NO: 1433 - DNA, 201 bp, Homo sapiens
cagggtcagactccacccttcactgtatcctacaaatagggatagcaaactgggccatcctcaggattaaatgagataatagccagcactactataatccyaaattttgtagttagtaattgtgatcctcttcctattttggataaggtgttgttttttcataggtaactctttcaggttgtaatactccaaatgtcagag

SEQ ID NO: 1434 - DNA, 201 bp, Homo sapiens
attgcctctgtatgttctgtcaattcattaaaagataaaggaaatctaagtgacatttgtttatgaacaaattgctcagagaactgaataggaaaatattygctaaattggcatactgttaaaagaatgatgaatccttgttaatagaaaagaaaatgccatattcacataaagtgtgtatctgacaagaagaatgataca

SEQ ID NO: 1435 - DNA, 201 bp, Homo sapiens
tctgtctcaaaacaaaaaacaaaaaacatgaaaaagcaacatacttggacccaattaatgtagccttccacaaaaatatttttgccttacattatactgtyatgagaattgactcttccatatttgctctaacttattcatttctggttcaatgtcttatataaaaaatcacacctcaaagtttctgtttaaatgctatac

SEQ ID NO: 1436 - DNA, 201 bp, Homo sapiens
ggttgcagtgagctaagatggtgccattgcactccagcctgggcatcacagagagagtctgtctcaaaacaaaaaacaaaaaacatgaaaaagcaacatayttggacccaattaatgtagccttccacaaaaatatttttgccttacattatactgttatgagaattgactcttccatatttgctctaacttattcatttc

SEQ ID NO: 1437 - DNA, 201 bp, Homo sapiens
agtgatacttaagaaaatctaaagtaccttgaaaaggaatgtggctccatgtgcatcaggcatttgtttaaaaatgatacatgtctccatgccttcttatrgctgaaggagttttattaataattattctgattaaatttcactcccaaggctaaatgccagttattgtttgaaataatgccccatcagaaatcttcccag

SEQ ID NO: 1438 - DNA, 201 bp, Homo sapiens
cggacatgaaccaccacacagagcccctagacagtttcaaacaaggatgagaaagtcctcaaccacatgacacttacacatattaaagtatatgtgatgarttacttatcccagattatagttatttcaaaattaaaacgatcctataagacaattagtcatctgcttcatgccctgtaaaacagtccccacaatttcttt

SEQ ID NO: 1439 - DNA, 201 bp, Homo sapiens
tgcccaggctgttctctaactcctgggctcaggcaatcctagtgcttggattcaaaatgttgggactacggacatgaaccaccacacagagcccctagacrgtttcaaacaaggatgagaaagtcctcaaccacatgacacttacacatattaaagtatatgtgatgaattacttatcccagattatagttatttcaaaat

SEQ ID NO: 1440 - DNA, 201 bp, Homo sapiens
gttcatggctgtagtgcactacgatcccatctgcgaattcccaccatattctacctgggaaactgggatactaggacctggtgtctttaaaaaaaagaaamaagtctaccagcccaagtaaaatcaatattatttattgaaactgtgctaaggactgtacatgattatctcgtggaatgtgaacaccaaacccataaggga

SEQ ID NO: 1441 - DNA, 201 bp, Homo sapiens
gaaccagcttgatagtttcccattggccaaatttgagaccagtggagcatcaaaatttgatactgcatgtttttacatacattcaagaacccaaatatacstggatcatctgaggtcaggagtttgagaccagtctggccaacatggtgaaaccccatgtctactaaaaaatacaaaaattagccaggcgtggtggcgtgc

SEQ ID NO: 1442 - DNA, 201 bp, Homo sapiens
gccgcgtttctggacggacgcgctctaaaaggaccggtccctcggctcccgaagggaacatttaaagggaccagcgcgtgccctactggcggtggagaggytgggcgggccccataggatgcccgctttggagccacaggacctcaaaatacgctccttacaacgtgttttatagagcgaagtctcgctatgccacccagg

SEQ ID NO: 1443 - DNA, 201 bp, Homo sapiens
gcttcttttaatgatactataatgctgaatttatttatgaaaaagaaacaatacaggttgaggtgggaaaagccccaaggaaacggagtaagtcactggcrgtcacaggacttgaattccctggggacagtgctgtggggtcccctgctcgccatcccagcacctcagtctgagtatagataatactgcatttttgtaaag

SEQ ID NO: 1444 - DNA, 201 bp, Homo sapiens
agaatgtgttggcgctgattgctctggactgaccataccaggtacacagtatgccttttcaatagagagcttcaagtcattttcctttcaaggaagttttyagaatgtgttatagctagaatatacaatttgttatatagtttttggaatttgttctttgccaatgttttgccttagatcatactgttagaagaatgtttt

SEQ ID NO: 1445 - DNA, 201 bp, Homo sapiens
tagaacctcgatctggcctgtaagaatatagtcaatgaattttactcaatgaatgttgaaagaacgaagtcaagagccggacatggtggcacatgcctatygcgggaggatcgcttgagcctaggaatttgagaccaacctgggcaacatagctagacctaccttgactctaaaaaaattaaaatgaacaaaaaagaaaga

SEQ ID NO: 1446 - DNA, 201 bp, Homo sapiens
cccctttgttttcttccaatatctttgagtgggtttttttagaacacaatttttgaggtataattggcatacgaataagctgttcaaatttcaagtgtacmatttagacacatatatatatccatgaaaccatcactataaaatgaggaacatactgaccaactgcaaaagtttccttgcacccctcataatctttctctc

SEQ ID NO: 1447 - DNA, 201 bp, Homo sapiens
gcaaatgccattatttcattcctgagtagtattccatggtgtgtgcgtgtttgtgtgtgtcacattttcccttatccactagttggttgatggacatttargctggttccatatttttgcaattgtgaattgtgctactataaacatgtgtgtgcaaatgtctttttcatacagtggcttcttttcctcctagtagatacc

SEQ ID NO: 1448 - DNA, 201 bp, Homo sapiens
gtgtcttggtttcctcatctacaaaatagagataatagcacctacatcacaggatttgttatgagaattaaattaataaagtacttgggacagtgtctaayatacagtaaaaaacataagtggttgttattatatgttattgtattatccctcaaatactttaatggaagcaactaaggatggatgaatggatggatggat

SEQ ID NO: 1449 - DNA, 201 bp, Homo sapiens
gctgaaattacaggcatgagccactgtgcctggcttttactggcgtaagtgaacagacatgttagtgaaccctttggcaaagaactgtgggcagcctctasgacttgagagtggcttccagatgatagccagaaaaaaatctgggtccttactcataaagccacaaggaaatgaattatttttttttttcctgagacaggg

SEQ ID NO: 1450 - DNA, 201 bp, Homo sapiens
aaaacttgtcagcatagtaacaccataatgaaatcatattcaaatcactccccccttgtagtttttttctttttgagccaattacacttaaaatgtcattratgaagatgtgaagtccagggtttacaaaatattttttatcttcttagtattcagtgcgaggaaatagaaatgctcataaaacatttttattgtatactg

SEQ ID NO: 1451 - DNA, 201 bp, Homo sapiens
taagctagaaaagaaatggttcatgtggttctgctgtccagcagaaggtaaagctgggaaggcaggatttaaccaacttgtaggaggcctttaatcccagrgtaatgaacttgggctagtagaaagcatgaaaatacccatgagcacgtggaaggagaaggagagaggtaagaggaaactgatattctagggagattaatc

SEQ ID NO: 1452 - DNA, 201 bp, Homo sapiens
aaaggtcttgttcttaaccacgacaaatctacagttatagatatttctagtatttttattcatttagtatgttacatgacagtccacaaaacacaatggtygagagcaaggacccaggagccagcctgcttgagtcccagttccagtatatactagcagtgtgaccttgggcaaggtgttcaacccttctgtgtcttggtt

SEQ ID NO: 1453 - DNA, 201 bp, Homo sapiens
caacatgaattagaaaatcaaatagaactgaacaaatacatttgttgaaattgcatcataattagtttttcacaaattatagaccatagaagagagtagcragaactttatctaaaggtacaaacagctgaaaagaatggtgggcttaggccgggcgtggtggattgtgcctgtaatcccagcactttgggaggctgaggc

SEQ ID NO: 1454 - DNA, 201 bp, Homo sapiens
ctgccaccacgcccggttaattttttttttttttttgagacatagttttgctcttgttgcccaggctggagtgcaatggcatgatcttgactcaatgtaasctccacctctcaggttcaagcgattctcctgcctcagcctcctgactagctgggattacaggcatgcaccaccatggccagcaatattgtatttttagta

SEQ ID NO: 1455 - DNA, 201 bp, Homo sapiens
tacttgggacagtgtctaacatacagtaaaaaacataagtggttgttattatatgttattgtattatccctcaaatactttaatggaagcaactaaggatrgatgaatggatggatggatggatacacagacagatagatttttttttttttttgagacagggtcttgctctatagcccaggctggagtgcaatggcgtaa

SEQ ID NO: 1456 - DNA, 201 bp, Homo sapiens
gttatgagaattaaattaataaagtacttgggacagtgtctaacatacagtaaaaaacataagtggttgttattatatgttattgtattatccctcaaatmctttaatggaagcaactaaggatggatgaatggatggatggatggatacacagacagatagatttttttttttttttgagacagggtcttgctctatagc

SEQ ID NO: 1457 - DNA, 201 bp, Homo sapiens
gaccttgtctgcaatatctttaattttgtttttctcacttttcctgcaatatctaaagcctcaaggacctttcagttgtcagtgacccagggaattctgtyagctggctgagatgttgtctcttgttgtgagtgcaaacatttagtcagacctgtctgaagccctctcctacccttgtagctcatgaatgagacccttact

SEQ ID NO: 1458 - DNA, 201 bp, Homo sapiens
attactcggtaggtcctgatccagattccaaccacctctctccaaccctatccaactccaggtggctaccatctgtacctgaaccactcccctcaaatcaytctccaaagggctcactcttcacagaaacaatcgtaccacacctgtttacacccttcattaacttccccactaccctcaggataaatctaaatcctttaa

SEQ ID NO: 1459 - DNA, 201 bp, Homo sapiens
caaccattttatggatagattcccctggacatcagagaaatgattatcttggcagtgtgtttgttgaaatggagaagcatgtctgcctcagtagcaagtgrctgctgtgactgtaattcccaacacttagggcttttgatccaagtatgtctatgccatgtgataatcactattggaaaacacttgtccattcagcccaca

SEQ ID NO: 1460 - DNA, 201 bp, Homo sapiens
gctcactacagcctcaacctcctggactcaagtgatccttgagcctcagcctcctgagtagttgggaccacaggtgtacaccaccacagctggctaaattktttttaattttttgtagaaacagggtctctctatgttgcctgggctggtctcaaactcctgagctcaagcgatcctcccacttcggccatccaaagtgct

SEQ ID NO: 1461 - DNA, 201 bp, Homo sapiens
gcttcaatcacctggaatattaactaatatggaatacatttcttaatgaagcaatatcagtgagttattgctattataaaatctttattcagaattatctyggtaggggaataaagtgtttaatttttttcaaaatattctaacttgaaaatggcaaaaatgaactatttcaagaaaaagctttgtaagttaccatatcat

SEQ ID NO: 1462 - DNA, 201 bp, Homo sapiens
gtttacattaaatggtttgtgaattctctggagaatatttaaatgctacactctcaatttaagaaatctgagtaagaaagaaataaagagctggaaaatayatgaagtcttaagttttgtataaataactgtaacttattcctctattataattaaacatgttttatagtaatcaccattcaatagtagttcttccaagtt

SEQ ID NO: 1463 - DNA, 201 bp, Homo sapiens
aaacacacttttaggaaaaagagaacatatatgtaagaggtgatccagtgactacctttctgggagaagagagctgtgagaagaaatggcttttcctaacrtaataatagtcacacaatactgctctagcagccttatccataacagaaagaaataacttagtgattatacaaaagtgaaatacttagcacaaacctggtt

SEQ ID NO: 1464 - DNA, 201 bp, Homo sapiens
gccaaaatacatataacacatactggtccagtgactctgccctttaggagaatggaagttctgaaatacaagtttcaggttagcatttgtactgagcgatyctggacaaaatttgttgttttggggtccttctatataaaaactctgtctatagtttctcaaagttggttgaaatttttaagtctacattttattttgaaa

SEQ ID NO: 1465 - DNA, 201 bp, Homo sapiens
aagcactaaggctaacaagtaatcatgtatctaaagaactctcaattatataactgttgattacatagcttggatttcaacttgttccttcttcatctttygcttattacctgtcttcaaccagtccttatcttttttagcaactcctctgaggccaaatagcagtagacttaggttaaactcaagttaatcttatgcttg

SEQ ID NO: 1466 - DNA, 201 bp, Homo sapiens
atccacctgatggttataactttcattgtacattaacaaatggatttttctttttaaaatatgtcatgcacattgttgataaaaacctgcagtcccaagtmagtgaaagactggcccttgagcactgatgagtctgagtttctgaacctgtaaatctctggtcttgaacagtatggtctttaggttactatggtaaagatc

SEQ ID NO: 1467 - DNA, 201 bp, Homo sapiens
tgagtttattttcaaagtagtaaatcaagggtaaggtttttagttatctcatgcaaatcatcacttcccacattgtacgcattcctatactcaggtttacygccagtgttggcttctcttagaaaagtgcacacaggtcatgaaaacgtttagggtggagtattttcattctgcgatgtgtgttgtctttgggtttgtgcc

SEQ ID NO: 1468 - DNA, 201 bp, Homo sapiens
cgtctggatgagggaaacacagaggcgcccagaaacctggagaaactgggaaccgcagagccccacagagggtgtcacatccctggctcaggagcaactasgtctgggctcttggaagagccacagctcttccctccttctcgtttcccacaacatggtgagtgggggcgacgtgtttcagccccgtttgtgttacagctc

SEQ ID NO: 1469 - DNA, 201 bp, Homo sapiens
tcctgccttggcctctcaaagtgctggcattagagctgtgagccaccatgcccgacctctttttatttcttaaagtcaaatgaaaatataatattgggctytttggtgaactagctaaaggtgaaattgtgacggtatgggagaaaatagatgtcaatagtgtagagtatgagaaaaagaaataactaaaatgatgaatct

SEQ ID NO: 1470 - DNA, 201 bp, Homo sapiens
cataaattctaaagtgtcgtgaaagactgatggtttgattttacatggaatgtgccatcctttttgaagtcctacatcattttgtttactagttaaccacygaaacattatgaagccttaactagcctattatcagagcctgttcactatcaggaaaactctttgtcactggcttccgtcacaccttgtatctgattaaca

SEQ ID NO: 1471 - DNA, 201 bp, Homo sapiens
tatatgtagtaaaagagttagcagatatcaaaattttcagcttaagaggctgtgtagatgacaatgttgttattcacaatgaatacagatggcaggactgytttgcttatcaggagaggatgttaccaatattgagtaccctttggatgcgagaatgataaactaccaggtactaagtacctctgtgtattgggaactatt

SEQ ID NO: 1472 - DNA, 201 bp, Homo sapiens
gcccaacactgtgaaaacaaagtgagaacacaagttatgggccacattattagccagattctcattcccttctatactctatgtcttcttctttcaaagtrgaacactccctttgatgtcacagaggctccatgaaaagataatagaagtgggaatataagcacacctatattaggatagaatagcattaaggtgatatat

SEQ ID NO: 1473 - DNA, 201 bp, Homo sapiens
ttatttataggataaatgaggcctattaaaattgagaaacagtgtagtagtctatgaggagttgtgttctgaaacagatgtgtgaaattccataacagttyggtaataaacagaacaaccaaaccaatttattttttaaaaaatctactttaagtttcttaaagaaactatcataaaggcaacctagtttcaaaaaaatgg

SEQ ID NO: 1474 - DNA, 201 bp, Homo sapiens
aatgaggcctattaaaattgagaaacagtgtagtagtctatgaggagttgtgttctgaaacagatgtgtgaaattccataacagttcggtaataaacagamcaaccaaaccaatttattttttaaaaaatctactttaagtttcttaaagaaactatcataaaggcaacctagtttcaaaaaaatggaaaacacttcattt

SEQ ID NO: 1475 - DNA, 201 bp, Homo sapiens
ttttcactttacgctttttaattgaaattaaattagtcacttaacatacataatgcagtgtttgttttccagtctagtagcttttcagcattcagttttgwggctcatgggaaatgttacttagcatcaagatgtggtttgatgagtgaacaatgtcagtatcaactgtacttaacagaagacagaggggctggggttaat

SEQ ID NO: 1476 - DNA, 201 bp, Homo sapiens
gataattctcttaggaaaagattctctgaagaaggaatatttgaactgagacttgaaaggtaagaagaagccagttatttaaaaagtcaaaagactattcmagttaagcacaaaggtgacaaagtgcgaaagaacttggtgaatgtctggggaagagaagggagtccagagtgggtagaattaacaagcaattataactgg

SEQ ID NO: 1477 - DNA, 201 bp, Homo sapiens
ctaacagtgaaaatggaaataaatagccaaatttcagatctattccagaaatgaaatgaaaacaacagggcatgcagatggtttgcagtggagagagaggstaatggtgaagaaaagggagataataaggaagattccaaagtttaaagcttgaactactaggtgggatggtggtgacacatactgagacgagaagattaa

SEQ ID NO: 1478 - DNA, 201 bp, Homo sapiens
ttgataacataagagcaatttggattataaattaatatttgacgagacctcagtaagagctgtatttccaaatgtagcaatttcaattcccagtctatttkaatagaaagccaaaatgatacttacaataaacagatttttagttggtccatcatgctgagaaatgtttctaatcattttcatcagcaatggatccttaaa

SEQ ID NO: 1479 - DNA, 201 bp, Homo sapiens
ggaaacacagatgatatacaccataacactctaagctatagagtattatacacatttacagtactcaattatataaaaccttttagaccacagttataaascacacctttctgagatgccccaagtaagatgataaaggcagttatgaacaaaacagagcatatactagaacagtgatgaaaccaaagcaaatttgttgtc

SEQ ID NO: 1480 - DNA, 201 bp, Homo sapiens
aatgtctatgttcccccaaaattcttatgttgaaacataatcttgaatgtgataatatttggggctgggtcctttgagaggtggttacgtcatgaaagcaragccatcatgtacgggattggtgcctgtgacagtctgttggcatgctgctaatacagacatacccaagacggggtaatttataaagaaaaaaagactggg

SEQ ID NO: 1481 - DNA, 201 bp, Homo sapiens
tgctcataccttgatttcagacttctaggctccagaaatgtgagacaatacattaccatgcctgactcgtatgttttataccatctggttttggtgcttarcaaccctaggaaatgactacatgtgtgtttcatacatgtgtttgatttggagcattgcacattaccatgccggactcgtatgttttataccatctggttt

SEQ ID NO: 1482 - DNA, 201 bp, Homo sapiens
atacacatgtgagggttgggctacactgtaaaatacatatttaaaataatatactttttaaccttaggaaaaatatatcttactacggattgaggtaaaamaagtgtgaaagtcagtgctctaaataaatttttcttgtccttttcaaattcatgtcctttataacacagtttccttactatatcttttgtataagcattg

SEQ ID NO: 1483 - DNA, 201 bp, Homo sapiens
tggataagccaaaaaaatctttaaacacttttaaaaacgtaacactataaaaatccccaaaaagactgcatctaacaattaagtaaagccaagttttgtargtccaattcaatttgcagataatcacatttgctgaagccaatggctatgatagatctcccagatggtagcattaagttaccagacataagaaactatctg

SEQ ID NO: 1484 - DNA, 201 bp, Homo sapiens
tgaactatgttcttgttcctcattttcagttcggtacgagtatcctcagcaagattcagaagcaaataaagagcaactagaaaagtaaaatatatgagagwtaaagaattagtatactgaattaataatttagaaaatcatttctactcaccaaggcaacagagatagccctaaaaaggtaatatattattttgaaaattt

SEQ ID NO: 1485 - DNA, 201 bp, Homo sapiens
ttaaattgaagcctcagggtttccagaggccaaaattaatataaaagtaaggtccacttttgcacaaagcagagttaaaaatgtatgatattctgcaaaayaggaataaagttttcactttttaaaagacataataaacacttgattcaaaggaaagttaccagcatgcctagttgatctgcaaaacatatcatggttgaa

SEQ ID NO: 1486 - DNA, 201 bp, Homo sapiens
gtcttctagttctcagatgtctcccctttccttatatggtgaaaactctaatagtctctcttcagcggagccactgaaggaagataagcctgtcactggtyctaggaacaagactggtattactctatctcctaacttctgttatttctatttcagattgagcttaggttccatttcttaaaagaaaatgctggattaaat

SEQ ID NO: 1487 - DNA, 201 bp, Homo sapiens
cccatttcaaaagttaaattcccaaaccattaagcagtagtaacagcagtagtaataataaatagctacttacatcaacacctccaaacaagtcaaaaatrtaagtatttggataagtggtttcttgggtaagtttcctctcttcagtaacaaatgccatagcctccatggagagaagaggagaaatttcctagttttttt

SEQ ID NO: 1488 - DNA, 201 bp, Homo sapiens
cctgaatgggataggaaggaaaaagtattaagacaaatgtgcttgaaaaatctagcaaaacctcgtgctcagtacacacgataatgatattcaggacaagyatcagtactgtcagtaaggagggccagggtctgaagaaaacatccgtgtatcccctatgcccagcacacacaaacccactttctaactttgctcattaat

SEQ ID NO: 1489 - DNA, 201 bp, Homo sapiens
ccactagtataaggggtaatcaagttttatacttgaatacatctgagtaacaagacataatttaacactttcttttaaaaaagctctgtatattattcagktttgagaatccaatggtctgagacacccttccccatctggtcagctagaggacacagctcacctttttaacacccaaaatatcttcaatgagggttgctg

SEQ ID NO: 1490 - DNA, 201 bp, Homo sapiens
tgctgggaaggcaaaacaagtgaactgtgctgagtgtcaccatttgtgacgggcagcactgagccaccttcacagcttggctgcccctccctagggatgcrctgttcaccatccagtggaacatccgtgccttcaatgccgtcaagaactggtcatggatgaagctctttttcaagatgaagccgctgctgcgctcggcgc

SEQ ID NO: 1491 - DNA, 201 bp, Homo sapiens
cagtggcccggctgaccaaggagaagaaggcgttgcaggaggcccaccaacaggccctgggtgacctgcaggccgaggaggaccgtgtgagcgcgctgacraaggccaagctccggctggagcaacaggtggaggacgtgagtcagggccaccccgagactgggtggcggggccggggtgccggctggcttgggccatggc

SEQ ID NO: 1492 - DNA, 201 bp, Homo sapiens
actcccccgtcgtctctaacgtaaaacctgtgcctaaagcctggcagaccaggactccaggtgaacttctggacaacccagcacactccacagagccctgkgttaactttacctttgcatcggtgttgatatatttattgaatctcttgaatgcatcaacgttgaacttcatcagctcccccaggaggtcaaagtaactct

SEQ ID NO: 1493 - DNA, 201 bp, Homo sapiens
gattttcaggcacacataaaataagcccgattcccccactgtctgaaagcagctcttatgtctgccattctactcgaatattcccatcttaaacattgcakacctggtaggggagataaacagagccccagtggcaggggtacttacacagacacaggtattatacaggatactcaagcagtccttggacatttcatcact

SEQ ID NO: 1494 - DNA, 201 bp, Homo sapiens
ttcatccaagtaagacgtaagatgctcaagtgcatagaatgtatttaaaataaattaacttcaaatggaagatagactatgtcagtgaataaaagttcctsaatgccaagcaatggcttacacctggcccacaattactgaaaagctggaagatttttacctacaaatctagatttcccataacctctcagggaaacactc

SEQ ID NO: 1495 - DNA, 201 bp, Homo sapiens
tgcctcaggcagaggcagggcaggcacagctgccccgtgccccaagggatggagggaaaggcccctcacttctgggagaacccccttggatgaacacagcrgccaatgagcaaacagaaccagaggagctacaggaaaatgaggcagaggggcaggcttgggggaaggcagcattctctggtacccaccacccctgcccag

SEQ ID NO: 1496 - DNA, 201 bp, Homo sapiens
gtggaggttgcagtgagccaagatcatgccactgcactccagcctgggcaatagagcaagattccgtcttgaaaaaaagaaaaagaaagaaaacacatttwatatatctaacccactgaacctcctagcttagcctagcctacctggaatgtgctcagaacactgacttcagcctacagttggccataatcactggcaaca

SEQ ID NO: 1497 - DNA, 201 bp, Homo sapiens
tgtttgtgatctcctgtttgacccactggttatttagaagtatactgcttaatttgcatgtatttattaatttcccaagtttgttatttatttctaactcrccccactgggatttgaggacatacttttgtacagttttaatccttttaaatttgctgaacttttttttaacagcctagcatatggtctgtcctggagaat

SEQ ID NO: 1498 - DNA, 201 bp, Homo sapiens
tgagaagaacgtgcattctgtagtagttgggtggagggttctacagttctctgttagtccttgttggtatacagtgttatttaagtcttctgtttccctgytgatcttctgcttagttttatccattattaaaagtagtatgttaaggtctccagctgttgtttttgaactactgctctcttccaatctgttagtttttgc

SEQ ID NO: 1499 - DNA, 201 bp, Homo sapiens
tggagacagggtctcactattgttgcccaggctggaactcctggactcaagcaatcctcccaccttggcctcctaaactgctgggattacatgtatgagcyactgtgcctgaccctttcttcttttaatacatatttaggtaaactacagtttttcactattaaacaatgttgcaatgaacattcttacaggtactctctg

SEQ ID NO: 1500 - DNA, 201 bp, Homo sapiens
agtgaatgtgcccaaaacgagtgcatgattcctagaagctctcatgaatcccatactcgcctctatttctagtaatggaggacaggaatttgctgtgcagrgggcattggggaacaactgcttccacttttccttttccctagtacaaaacaaatgtaagctactactattattggcaactgtaacttgtagctcaccagt

SEQ ID NO: 1501 - DNA, 201 bp, Homo sapiens
aaaactctgtctcaaaaaaaaagaaaaaaaattctgtgtgtgtgtatttctcattctttttgatgctcaaattgtcccaaatttgaccattggtagtcctytcaaattaattcctgtgtcatctttgggacaatcttaattttaaatgggccctgtgggacttaaacttgtccaacactatgatcggttctgagttcagaa

SEQ ID NO: 1502 - DNA, 201 bp, Homo sapiens
acttaatacctgtcctctcttcctgtcctgaaccccagcaccctagccttaacccctgacctttctaccacataatcctgacagctgacctctgaccattrtccccaggtgactccgcagctaccatcccaactctcaccctgacccactgccctgggactggcccagccctgtcagttctgacacctgttaagcccagca

SEQ ID NO: 1503 - DNA, 201 bp, Homo sapiens
tgccctcatggggcttatacttctgggtaagatctaccctttattgagcacttaccattggccaagcactttctttgcactatcttattattctcgcagcwtttttggggaagtttttcaaatctacagaaagttaaaagatacaccattaacactcatataccctttgcttagacttgtcagctactaaaactatatttt

SEQ ID NO: 1504 - DNA, 201 bp, Homo sapiens
acacatacaaaaaggattatactccacgcatgatggcttatgcctgtaatcccagcactttgagacgtcaaggcaggaggactacttaagcccaagagtaygcaaccagcctgggcaacatagtgagaccctgtctctacaaaaattaaaaccaaaaattagccaagcatggtagcatgctcctgtagtcccagctactca

SEQ ID NO: 1505 - DNA, 201 bp, Homo sapiens
cggcctgggatcctttatcacgaaatgcaggttacaggggaagacagcagatccatacacaaagaaacgcagtctcaaactggataagttgtgtaactggrtaggttgttgtgaaattaaataatggaagggaaagggattagtaaattgtgacatcatattctctgtcagatgaaaaccctgtcctaatttctatccacc

SEQ ID NO: 1506 - DNA, 201 bp, Homo sapiens
ggttctagtcccagcttggccacctacttgcccttctctggcctcagctttctcatttttgaaaagaagtattttagattaggtaatctctgggatctaaygcggctttaatttctgaaaagctgcagaacattattactatgattcttctgtttaaagaacatttgtaagtttattttaaaaggactcaaaagatacacc

SEQ ID NO: 1507 - DNA, 201 bp, Homo sapiens
gaattgaaagtgtgttttctataggctgcatataactggatcttgttttctgatccaatataacaatctgtcttttgaatgaattgttaaatctattcacrtttaatgttactattgataaggctggactgacttctgccatttaactttttgttttctgtatgtcttgtgtgtttttttgttcctctatatctcctttag

SEQ ID NO: 1508 - DNA, 201 bp, Homo sapiens
aaacacaaattactaatatgtggtacataagaggagttattattactgactccatggacttcgaaggatgataaaggagtattatgaaccgtttgccccartatttgcctagcactttgggaggctaaggcgggaggattgcttcagctcaggagttcaagaccagcctgagcaacatagcgagagctcgcctctactaaa

SEQ ID NO: 1509 - DNA, 201 bp, Homo sapiens
acttcaagactcatcttagatgtatctaaggacctcagagaaggtctccctgtattcacccagcccccagccctagcagcggaagaggctttcctttgctsctatagctcctgggccaaccctggctccattccttcccacactgcattgaaacagcacagctctagggaattcatggcagggcccgtatcctagttctct

SEQ ID NO: 1510 - DNA, 201 bp, Homo sapiens
caaaaacattatgccaagtgaaagaaaccagattcagaaggccacatgctatatgattccatttacagttatgcactgcattaacgctgttgcggtcaacracgaccacacagaagacggtggtgccatcagattataatactgtatttttactataccttttttctatgtttagatacacaaatacttaccattatggta

SEQ ID NO: 1511 - DNA, 201 bp, Homo sapiens
cttgacctcccaaagtgctgggattacaggcatgagccaccgcacccggccaaagaaaattgtttctaatcgataacctaatcttctaccttaagacactrgaaaaagagcagactaaacccaaagcaagcaaaagggagaataagagttgaaacaaatgaaacagagaatagaaaataacagaaaatgaacaaaaccaaa

SEQ ID NO: 1512 - DNA, 201 bp, Homo sapiens
ggagctgttgatctgcttcaggaatacctggaactatacagaaaccaagctcacagcaggcagtgggctgctggccaggtatggccatggcccggggggayagtcactacaaggggcatcagcgacctctaccagccccactgcttcagataggaagacagaggctcagataagctgagggacctcccctcaccacccagg

SEQ ID NO: 1513 - DNA, 201 bp, Homo sapiens
atccccttacatacggggcttagtggctagatcacttaggttcctatcccagctctgtaacttgcagctctgaaactttggttaagttacaaaaacctttmgagtctttgcttgtttatctgtaaaacggaactaatctacctcacaggattagtctgaggactaaatttaccttttgagcaccactgttttcaattgttc

SEQ ID NO: 1514 - DNA, 201 bp, Homo sapiens
ctagtcggatcatttcctacagaagacaaaaatgaaacaatccccatgctcaattcactcaagagattggatgtgcctctctttcgcatccccttacatayggggcttagtggctagatcacttaggttcctatcccagctctgtaacttgcagctctgaaactttggttaagttacaaaaacctttcgagtctttgcttg

SEQ ID NO: 1515 - DNA, 201 bp, Homo sapiens; identical to SEQ ID NO: 307

SEQ ID NO: 1516 - DNA, 201 bp, Homo sapiens
ggaaccatgtgaatgttacacctaattaaaaattaataaataactagatatttcaggatatcaagggattactattaatttttgatacagtggcagttacrtttcttaaaagtcgttatcatgtagaaacactgaaatatatgcaggtgaaattatacgatgtctggggtttacttcaaaataacccaaggtgaagtaggg

SEQ ID NO: 1517 - DNA, 201 bp, Homo sapiens
aatgaacgtctgcgaagaaagagacagggcagcctgacccctctccaagtcaccaccaacttttggtgcctggcttgcgcaggcctgacaagactttctgygataaatattttcaagaaacagtctccaaagcaatggccagagcttagcaacaaggtcagtcccaaggatgaggatgggaaaaccagctcacgaggcctg

SEQ ID NO: 1518 - DNA, 201 bp, Homo sapiens
tgtaggttatgggcccctcctcctccgtcttggaactacttcaaggctcagggaaccttgcacatctggagctccctgtacttgcccagttttcctaagcrgacacagctctgggctctgtcccactgccctgagcccacatcaggttggcaactcctctagcatgtccacagggccaggcttgccagctttcaactcttt

SEQ ID NO: 1519 - DNA, 201 bp, Homo sapiens
cagcctggatctaccttgccctgcttaactgggggtggggaggtacggctgacatctatggtgttcaccaagccatgtgccttcctgtctcactccaaagrgccctaagccaggcccaggtcacacagctataaaatgttccaacaatggcccaaaaaaattcatccagtgcaattgcctcactgcacagactagaaaccc

SEQ ID NO: 1520 - DNA, 201 bp, Homo sapiens
aaacccccacaaaatcaagaacagttgatccaaagatgtccgaagatgggataggctcctactagagagccacatttccactgcaaatagacacaggctasagacctacattattatttttcctcccataaatacatcagttcttactaagtagatttcttgatgaaacaattcaaaagtaaagggtctcttgagctagcc

SEQ ID NO: 1521 - DNA, 201 bp, Homo sapiens
ctgctcaatatatgggcggggcttctggttctcattttgttttctaacaaggaaaatgaagaaataggcataatggagttaaaatgagtcttaaaggtcayagtctgccaacacttgtcaccttttgacaagtgtccagtttctacttggacagctctaaggccaaaggagtttactacctgctgcagcagtcctggctct

SEQ ID NO: 1522 - DNA, 201 bp, Homo sapiens
tttatatgtcgtgaactgaacaattgccgagagataatactgggaaagcaagtgtgctcatgctgtattactgattgtgtaaaaaaagaggaatacaattygcctttgtaagcataaaaatgtctctagaaggatacactaataactggtaaaattagctgcttcatggaaccattagaatagaatgtcaaggatcagagg

SEQ ID NO: 1523 - DNA, 201 bp, Homo sapiens
cccaaagtgctgggattacaggcgttaagccaccgtgcctggcctcagtgaataatcttgtacagtagtcctcccttagtcaagaccctcacagtggatayctgaaatggcagatagcaccaaaccctatatatactatgttttttcttatatacacacataactatgataaagcttaatttataaattaggtacactaag

SEQ ID NO: 1524 - DNA, 201 bp, Homo sapiens
tacaaatattaatttccctcccctttaacttcacctcaatctcctgagattttgcaagaagcaaataatgtgcaactctttgaaaagcatttttaaacaartttaagaagctataattatttctatcagactgtgagattcaaaatatgaaaatgtctcttcttaaacgtaaagactaagtttaattagtttctattacat

SEQ ID NO: 1525 - DNA, 201 bp, Homo sapiens
gatttgttttttttgttttttgtgttttttggctatttaagtagaccacaaatgaacaacttaatatatatgtgtatccttttcatgtttgtattaaactrgttcctcaagatacattttcaaaagtagaactactagaatctaaagtataggcatcttttttttgttcatttgttttggttttttaaatgaggtcttact

SEQ ID NO: 1526 - DNA, 201 bp, Homo sapiens
ttccctcttagatcaggaacatgctacttctattcatcatactggaggtctcaggcagcagagtaaggcaagatatatagaagacataagattggtaaggrtaagataaaagattcatttgcagatgatataatattcacagatgactgtacagtatacaatccaaaagaacctaaatgtaaattatcaactattacagca

SEQ ID NO: 1527 - DNA, 201 bp, Homo sapiens
actgcgcccggcctaaaattgttttaattaaaaaaaaaaaaagaagaagaaagaaggtacagaatagtgtagccgtgtatatggtatatcactctatgtgsggagaaaataaactaaggtggaggtggtggggaatatttacacacacacacacacacacacacacacacacaaaaaaaacaaaacatcttaagcaggaca

SEQ ID NO: 1528 - DNA, 201 bp, Homo sapiens
aagaaaaaaaattctgtgtgtgtgtatttctcattctttttgatgctcaaattgtcccaaatttgaccattggtagtcctctcaaattaattcctgtgtcrtctttgggacaatcttaattttaaatgggccctgtgggacttaaacttgtccaacactatgatcggttctgagttcagaaaatagtctctctaaattttt

SEQ ID NO: 1529 - DNA, 201 bp, Homo sapiens
tcccatcagctggccacaatggtcttccctcgttcaggggcttctggctagaacacacaccctctcacatgcctgttcactcaattcactacaagctgacmcttcaggtcttggctggcaagccacttctgcaggggagagttcctgagtgtcctctggccagtcctggaccctgtcaaatgtctctcacagaccccgttc

SEQ ID NO: 1530 - DNA, 201 bp, Homo sapiens
atatttattctcctgtaccttgggcaaaaaactatagttactcaatttccatgttagcactccttggcccagcttccagaacagttaagtgtcagctaatstgtgaagtgaacctgaagaactatcacgcagaatcctgcctctgtcgtgcactgctgtgagaccttgcgtgcttggcatcctcggcacccagcccatggt

SEQ ID NO: 1531 - DNA, 201 bp, Homo sapiens
atatatgcaggtgaaattatacgatgtctggggtttacttcaaaataacccaaggtgaagtagggtatagtgaatgggagtagagataaagtaagacaagstggccaggcacggtggctcatgcctgtaatcctagcactttgggaggccaaggtgggtggatcacttgaagctaggagtttaagaccagcctggtcaaca

SEQ ID NO: 1532 - DNA, 201 bp, Homo sapiens
ttaaggttaaatgaggttacaaagtgtggggccctaaaccgagaggactggtgtccttctaagaagaggaagagacaccagagatctccgtctctcctcartgacagagaggaaaattcatatgtggatacaataaaaaggtggccttctacaagccaggaagaaaggcctcaaccaggaaccaatcctgacagcaccttg

SEQ ID NO: 1533 - DNA, 201 bp, Homo sapiens
ggacaaataatcaaatcgaaaaaggtgcaaaacagaaaactggcagaaaaggaactacttataaacacaagaaaaaatatccaatctcagtcatagaagartgaattttaaaaactatgcagagaatttataaagaactcttacaacacaatattcaaaagagatatatctcaactaagaaattgaaaaaggagagacaga

SEQ ID NO: 1534 - DNA, 201 bp, Homo sapiens
ttactaaatacctgaaaattcaaacaactgtgaaagtgcctcgaaaaagtaatagcactcaatgcacagaagctgtccctacaattatttcacatataagyaactgcgaaagtgcctcaaaaaagtaatagcactcaatgcataaaagctgtccctaaaactattattttttattaaaaacatgttccgtattgaaggaag

SEQ ID NO: 1535 - DNA, 201 bp, Homo sapiens
gaggcatgagaattgcttgaacctgggatgcagaggttgcagtgagctgagactgcaccactgtactccagcctgggcaagagtgatactctgtctcaacrcgtgcgcacacaaacacacacacacacacacacccctcccataattagtgagtggctataagatgatgtttgaccttagttataaaataaaactacattg

SEQ ID NO: 1536 - DNA, 201 bp, Homo sapiens
ccttggcaacagagggagaccctaactcaaaaaaaaaaacaaaacaaaaaaaccaacaacaacaaaaaaacaaaacccccaaggggtatgaaggaagttarggaaactagctggtaaaagaccttaaaacttaggttcaagagtttggatttaaaactgcagtattgtcaagtgcagtggctcacacctgtaatcccagct

SEQ ID NO: 1537 - DNA, 201 bp, Homo sapiens
tcagcagctgtgggcagtgtggagaggtggagacaagacctagtcacactaaggcttgggttttaatgccctgcagggactagacagggtgtcaggtcccrgtaaagcctggggagcatgtacacttggtgaaagaagggttagaaaggcctgacccaccagcccagggagcctggctctgccatggtgctgctggtgggt

SEQ ID NO: 1538 - DNA, 201 bp, Homo sapiens
ttctccaaaagtccaataataaacagatgatcaacattagtcatcagggaaatgcaaatcaaaaccacaatgagatacctcttcatacctactacgatggytataatgaaaaagacaaatagtaactattggcaaagatgtggagaaattagaaccttcatacactgctggtagatatgtaaaatggtgcagctgcttcag

SEQ ID NO: 1539 - DNA, 201 bp, Homo sapiens
gaaaagaagtattttagattaggtaatctctgggatctaatgcggctttaatttctgaaaagctgcagaacattattactatgattcttctgtttaaagarcatttgtaagtttattttaaaaggactcaaaagatacaccataaattgttaacactgatttctacaggtttgggggttatatgcatgtgttttttatttt

SEQ ID NO: 1540 - DNA, 201 bp, Homo sapiens
tccctcagccctccccagactggctccagacccgtgccctccatatcacacacagaagagttccctccacaggaagatggatccatgacgctgcattaagraaaacaacgcaaaagttccactccttctgcagaggtcctagcgcaactggttttccacaccagctctcaggtgagtccggcccagtgctgagaccacaag

SEQ ID NO: 1541 - DNA, 201 bp, Homo sapiens
acacatgcagacaggccactgggctcacagacgatgggctggcctagggaagtagtggttgatgctgaccgagggacccagagggcacagcgggtatccaygacagggagtttggacaaggcactgaagtgacaaaggcccatgtgggcatgaagcctcctgacagctcacgcccggccctgatggaactctacctgtcca

SEQ ID NO: 1542 - DNA, 201 bp, Homo sapiens
agcgagactccatctcaaaaaaaaaaaaaattacaggaaaataacttccaatttatacttctatacccagtcaaactaaatatatgtgtcagaataagacrttttctgatctgcaagctttaaaaaaaaaaaaaaagttacctcccatgtactctttcttgggaggctaccagagagtgtgccccaggaaaaaggaagaca

SEQ ID NO: 1543 - DNA, 201 bp, Homo sapiens
aaagaccaagttagaatacacagctgagacattaaaaatgaatataaatcctcttaataaccactactgcatgcacaaatgaggccttatacagtatgtcstattggggtaaaaaaaaaatcttttaaattaaaaaaacgcaaagttggtaggagggcattcaccaaacattaactgaagtcatctctggcttttaacacc

SEQ ID NO: 1544 - DNA, 201 bp, Homo sapiens
agattgcgccattccactccagccgggcaacagtgcgagactccgtcccaaaaaaaaaaaaggtatacacaaggcaaaacaatttaaaaggatgcattatwcctgacttcaccaccatgcgatacaccaatgtagcaaaatttcacttgtaccccattaatacaaatttaaaaacagtaaaataaattaaaggatgcacta

SEQ ID NO: 1545 - DNA, 201 bp, Homo sapiens
taaattaaaaaaaaaaaaaactaagaaaagaaatatttgaaagatgaaggtccccattttatcctcactatagctccaggcagggggtctctacttcaacytctgaaatagctcccacacctatatacaaccatcagttaccacaataacctgccttgcttttgtggctccagaatattccagcagccttgtatctggtga

SEQ ID NO: 1546 - DNA, 201 bp, Homo sapiens
aaaaagtttgataatgctctgtactgggaaaggctacagacaacacggtggggaagatgaacaagtaatttctttggagggttaatttgtcaacacttacsaatttccattaatgggggactaattaaattacagtatgcctgtataatagaatattatataattacaaaaaggaatcatataattctatatatactagag

SEQ ID NO: 1547 - DNA, 201 bp, Homo sapiens
aacatgggagacagaggttgcagtgagccgagattgtgccactgccctccaacctgggcgacaagagactccatctcaaaaaaggacattttaagtaatayactgtagcaactctggatactgattccccctccttcagggtttgttgttgttatttgcttatttattagtttagtgacttggttagactattttcgtaaa

SEQ ID NO: 1548 - DNA, 201 bp, Homo sapiens
actgattttcaaatgttgaaccaaacttgcataaatccatttggtcatggtatacaatccttgtatgttgctatacttggtgtgctagtattttgttgaakatttttgcacctataatcataagagatactggtcttgtgatgtctttatctggttttggtatcatgataatatgacctcaaagagtaagttgggaactgt

SEQ ID NO: 1549 - DNA, 201 bp, Homo sapiens
cgtcatgttaaaatcacaaccttggaagacgacaagctgctgaatgaagtgtgactgagacacagtgtgacacggtagttaagagcactgaccctgaagcyagactactgggtttgaaccccattcactagccgggtggtcttcagtaaatcagtggacctctctgtgcttcagtatccatcctcctttgtaaaacagcaa

SEQ ID NO: 1550 - DNA, 201 bp, Homo sapiens
aagagtattgaactgtttatcatgagcccaggaaaagatcaaaattcaaaattctacttctgtaccattgtgaagttgaaaaattctaagtggaccatctstatataaaatccaggcctgtgactgtgacccacaacaccctgtgactgtgacccacaacgtcctgtgcagcccagcccagagccaagcccacatcactcc

SEQ ID NO: 1551 - DNA, 201 bp, Homo sapiens
gcaagctgatcctgaaattcacatgcaaatataagggatgcataacagccaaaacaatcttgatctgtaaatacaaaaataaacccgtgtctatgatcagytgatttttgacaaggttgccaagacaattcaatgatgaaagagtagttttttcaataagtggtgctgtgacaactggatagtcacatgcaaaagaatgaa

SEQ ID NO: 1552 - DNA, 201 bp, Homo sapiens
agtgtaaaacctctgtacatgagcaagctagggcaaaggtgatcagagccatagaattcttggcctcaagtatgtgggatagagcttccacaccgtgagtmcagtatggagctgggtggaggaaggaagcctctgacctctttgccatactcaccgagaacttagtctcttcaatttggagctggagggaagaagaaaagc

SEQ ID NO: 1553 - DNA, 201 bp, Homo sapiens; identical to SEQ ID NO: 512

SEQ ID NO: 1554 - DNA, 201 bp, Homo sapiens; identical to SEQ ID NO: 533

SEQ ID NO: 1555 - DNA, 201 bp, Homo sapiens; identical to SEQ ID NO: 534

SEQ ID NO: 1556 - DNA, 201 bp, Homo sapiens; identical to SEQ ID NO: 535

SEQ ID NO: 1557 - DNA, 201 bp, Homo sapiens; identical to SEQ ID NO: 536

SEQ ID NO: 1558 - DNA, 201 bp, Homo sapiens; identical to SEQ ID NO: 537

SEQ ID NO: 1559 - DNA, 201 bp, Homo sapiens; identical to SEQ ID NO: 540

SEQ ID NO: 1560 - DNA, 201 bp, Homo sapiens; identical to SEQ ID NO: 541

SEQ ID NO: 1561 - DNA, 201 bp, Homo sapiens; identical to SEQ ID NO: 549

SEQ ID NO: 1562 - DNA, 201 bp, Homo sapiens; identical to SEQ ID NO: 550

SEQ ID NO: 1563 - DNA, 201 bp, Homo sapiens; identical to SEQ ID NO: 552

SEQ ID NO: 1564 - DNA, 201 bp, Homo sapiens; identical to SEQ ID NO: 554

SEQ ID NO: 1565 - DNA, 201 bp, Homo sapiens
ttggatacgaccgtgcctggggttcagcggtcatgaacataacccgcggctgtgaacatcctgtcggcctccatcctgacccccgtttgatttccgggtcwgcgggaggggcgggaggggcggaagcggcctctgcacagccctgcccctgtgccgcaggcgcttcctccggctgtgccagtcctctgccagaaaccccgc

SEQ ID NO: 1566 - DNA, 201 bp, Homo sapiens
taaaagcctacaggcttagataatggaagagagagctccgtcctcacactcctttctgctgagcatgaaatgcctggttactcaccagttgtgaagacttygtttgtgaatgagacggtcagttcagcggtggcttctgagaattctaagaaagcaaaacaatgttaggtcttccccgtggttccctatatcctctagata

SEQ ID NO: 1567 - DNA, 201 bp, Homo sapiens
gacaaaggagttggctttggtgaagagacgggtgagaaggaagggggtctggagaggatgacttactcaccagctggagagtctgactcctttggactggyggtgatactcctagaagtctctgggaaccaaacaaaggctaagtgtgaaatgaaaccatattcccgccccctgtcactgtgcctactccgaacacacaca

SEQ ID NO: 1568 - DNA, 201 bp, Homo sapiens
attaaatcgagaagtctaggcagagaggagagagagaaggggtccgtgtacctcatacgctgtgcaccagaatggaccctgcagaacctacctgctaccgrggaaggtggttctgttggtaaccggctgggggtcacagaggttcctgggaaatcagaaaatgagataaatctgtgctctgtcgctgtgggtcctgaacaa

SEQ ID NO: 1569 - DNA, 201 bp, Homo sapiens
ccatgatccctcccttggatacgaccgtgcctggggttcagcggtcatgaacataacccgcggctgtgaacatcctgtcggcctccatcctgacccccgtktgatttccgggtcagcgggaggggcgggaggggcggaagcggcctctgcacagccctgcccctgtgccgcaggcgcttcctccggctgtgccagtcctct

SEQ ID NO: 1570 - DNA, 201 bp, Homo sapiens
taacctaaccacaagactaacctactgtcacttctgccctatcctactgctagaagccagtcgctacatctcccccacactcaaagggaggtggtcgcacygtggggtccactggaagttgcctaccagactcaggtcatcccaaacacaccctctagccatttggtgtggcatcggaaagaaaactaaggccaggtacgg

SEQ ID NO: 1571 - DNA, 201 bp, Homo sapiens
acgcacgtggttgttggtgtgattctgtttctccagattgtctccattcctccctggcttctccacagggccgctcaccatggcagccggctccatcaccrccagccagcgagagggcaagacaagagggctgacgagggacgctaccatcacagaggtcagttttgtaacctaaccacaagactaacctactgtcacttc

SEQ ID NO: 1572 - DNA, 201 bp, Homo sapiens
taaaaaccacttcctttgctcatttatcaaactcaaacgctaggagggccacctaacatcctccgtcccacgcaatggggtgtttctggagcactccggtktatcagggaccctgtcagttgccatcgcacatgtatatggggccagcccctgtgccaccgaagaggggggatattgaaaacatgttacagccaggagcgg

SEQ ID NO: 1573 - DNA, 201 bp, Homo sapiens
ctgggggctgaccacaggtatgggtccctgctggagaagctgtagcatcggtaggttccgctgtgggcggcggtcaccgtgatgatgggaaaactagccckgtaccatctctcgggattcttgtagggcgcagggtccccttccttgtacagagcaaattggtcaaagccataccgagtctgacactgtagggttacgtcc

SEQ ID NO: 1574 - DNA, 201 bp, Homo sapiens
ccagggggtcgctgggggctgaccacaggtatgggtccctgctggagaagctgtagcatcggtaggttccgctgtgggcggcggtcaccgtgatgatgggraaactagccctgtaccatctctcgggattcttgtagggcgcagggtccccttccttgtacagagcaaattggtcaaagccataccgagtctgacactgta

SEQ ID NO: 1575 - DNA, 201 bp, Homo sapiens
aaacgctcctccttctgaaccccagagctccactctgcacccatgctctagcctcacaccaaggactttcttggtaagagacggacagttcggtgaagtgrttaaaagcctacaggcttagataatggaagagagagctccgtcctcacactcctttctgctgagcatgaaatgcctggttactcaccagttgtgaagact

SEQ ID NO: 1576 - DNA, 201 bp, Homo sapiens
tcctctgtcttctgatagcatctcagtatgattttccactatgttaagacgaggaattgacccattcttacatttggaggcttctctaagcaactttcccrttcccccttcacccaagctgtgtgctcactagccctgattcacagccgtcgtcctggaacttcttggtgccatccttctgtcttttcccaagtgactcac

SEQ ID NO: 1577 - DNA, 201 bp, Homo sapiens
atatttatggggtggacagcaatattgcagtacatgtatacaacgtgctatgatcaaatcagggtaattgacatattcatccctgtattttttgagacaargtcaggcttcgtcacccgagctagagtgcagtggtgtgatctcagctcactgcaacctctgcctcccaggctcaagccattctcccacctcagccccctg

SEQ ID NO: 1578 - DNA, 201 bp, Homo sapiens
gagacgaaaggagatttgttagaccgcagtgggagatggagtgagggtgagagtttctggggaaaaccagacaagagcacagagggccaaagggaagcacrggaggattttgcacagaggatggaacagagtcaaccctgagagctgggaaccttagagatccgtctggagcccatattagagaggttgaagaaagaggcc

SEQ ID NO: 1579 - DNA, 201 bp, Homo sapiens
gtatatccatgttgtagtatgtgtcagaatttccttcttttttaaggctgcataatattccattgcatgtatataaccacattatgaggtatgctgctctyttttgaaagaaaccccctttaagaatggtagtcaagtccgacgcggtggctcacgcctgtaatcccagcactttgggaggccgaggcgggcagatcatga

SEQ ID NO: 1580 - DNA, 201 bp, Homo sapiens
gtgctcctggcatgtggtcggtcgaagccaaggacactgctcagcattctgcagtgcacaggacggccccgcccaggcggagaatgatccggtgacacatrtaggtgggaaggatgcacgaatgatggcgtttaggaagaatattatcacttctttcccgtaagagcaacttagagcaagaaaatggtattattcttaggg

SEQ ID NO: 1581 - DNA, 201 bp, Homo sapiens
tagggccttctctcttatggaggctccaagccagggttgccatggcagaagatgctgggcttgctttttccttgagagaactgtactcaagatgatgtaamtgtcaccccgggtgccacttgggtgctttggagaagcgctcagacgcgacacgccgtgacgactccgcggcaggcagccggacctgtcctctggcgtgcg

SEQ ID NO: 1582 - DNA, 201 bp, Homo sapiens
ctgccttcaggggcctggtggccctggagacaaatctccctctgtatctgagcctcactgccttgttctgttaaaatggggatgactgaatgagacagtayacagtaatttgcagagtgcctgttgcctagcaagcgctggagtaagtaaatagcttaagcttatactgtgctgtaagcttgtattgccacatacaattgt

SEQ ID NO: 1583 - DNA, 201 bp, Homo sapiens
cccaaagtgctgggattacaggcatgagccactgcacccgaccggctataattttttttaatggaaaacagcagatattggtgagtatgcagagaaattgractgcgcgtgcattgctggcagggacgtaacatggcgcccctgctgtggaaaacagttccagcagctcctccagaagttaaacgtgggattgccataaaa

SEQ ID NO: 1584 - DNA, 201 bp, Homo sapiens
cctgacctcagttgatccacctgcctcggtctcccaaagtgctgggattacaggcatgagccactgcacccgaccggctataattttttttaatggaaaayagcagatattggtgagtatgcagagaaattgaactgcgcgtgcattgctggcagggacgtaacatggcgcccctgctgtggaaaacagttccagcagctc

SEQ ID NO: 1585 - DNA, 201 bp, Homo sapiens
tccccccaaaaaaaaaaaaaaaaaaaaaagcagcagcatttgtaaagcacacctggcacattctgggctattaacaaggaaatgcatgcagctcccgtccrcctttttcaacctcagttctatttcttctggattcctgtgtcctacccctcactgtgaccctgggggcaaaacagatttttctaccaaaaactaaatgat

SEQ ID NO: 1586 - DNA, 201 bp, Homo sapiens
gacctactgaagcagaagccctgggggctcagaaatctattctttaagcctccaggtgattcttatgctcatggaagtttgagaaccgctgatcaatgcawtcagtgactcagaaacagagtcccggactctacaggtttgttggttggttggttggttggttggttggttagtttgtttgtttttgtcacccatattcaa

SEQ ID NO: 1587 - DNA, 201 bp, Homo sapiens
ataatagccctcactctgccctcaaccccgcaaatctcatccttatcaacctcggctctttccagcatgtttctcctgccttggtgcttcactctgagacrcagggaatgttagacacgcccagcctccagcctagcgtatgatattcttaaagtgcaggccgtagtctggtacaccgtattcagctgagatgtttgtgaa

SEQ ID NO: 1588 - DNA, 201 bp, Homo sapiens
ttataaatctttaatacataagctggctttaaaattattggtaaaataagattagaaatgtcttaagaattgttggcgtttttgtttgcacttattgaacragtggtttcatgcttatccctgcagaatactatgagatttgtcataagggttataaaactataaacccggctgggcgtggtggctcacgcctgtaatccc

SEQ ID NO: 1589 - DNA, 201 bp, Homo sapiens
ctcctagaagtctctgggaaccaaacaaaggctaagtgtgaaatgaaaccatattcccgccccctgtcactgtgcctactccgaacacacacacacatggkgaggcacaattccacagcatttaagaaaagcatgggccgggcacggtgcctcatgcctataatcccagcactttgggaggctgaggtaggaggctggctt

SEQ ID NO: 1590 - DNA, 201 bp, Homo sapiens
ggagaatcacttgaacctaggaggcagaggttgcagtgatctgagatcgcaccactgcactccagcctgggtgacgcagtaagactccatctgaaaaaaamaggcttagccaggcgtggtggctcacacctgtaatcccagcactttgagaggccgaggcaggcagatcacctgaggtcaagagttcaagaccagcctggc

SEQ ID NO: 1591 - DNA, 201 bp, Homo sapiens
agctctcttcctcttggtcagccccagtcctcaccctaccccatttctcctttaataacatcttattaaatgcacctggcaccagcctcaggttaaggatytttttttggccaggcgaggtggctcaggcctgtaatcccagcactttgggaggccgaggcgggcggattacctggggtcgggagttccagaccagcctgg

SEQ ID NO: 1592 - DNA, 201 bp, Homo sapiens
ggagaagggtgtaggtgtgaatataaaagggtagcccaagggaggcccttgtgagacggaagagttctgtacagtgactgcggtgatggtgacgcgaatcyacaactgtgacaaattggcatagaactagacacctactttatgccaatgtcaaattcctggtttttatgttgtactctaattacgtaagatgtaaccatt

SEQ ID NO: 1593 - DNA, 201 bp, Homo sapiens
ataaaagggtagcccaagggaggcccttgtgagacggaagagttctgtacagtgactgcggtgatggtgacgcgaatctacaactgtgacaaattggcatrgaactagacacctactttatgccaatgtcaaattcctggtttttatgttgtactctaattacgtaagatgtaaccattagaggaaactggaaaaagagca

SEQ ID NO: 1594 - DNA, 201 bp, Homo sapiens
acagtgactgcggtgatggtgacgcgaatctacaactgtgacaaattggcatagaactagacacctactttatgccaatgtcaaattcctggtttttatgytgtactctaattacgtaagatgtaaccattagaggaaactggaaaaagagcacatgggattcttctgttctatcattgtagacttcctgtgactctagaa

SEQ ID NO: 1595 - DNA, 201 bp, Homo sapiens
acaaaaggatatctcaaacggttgcatactggatgatcccatttacatcagattctagaaatggaagattatagagatggagaacaaattaatggataccrggagttagggatggcaagggaaggagaagggtgtaggtgtgaatataaaagggtagcccaagggaggcccttgtgagacggaagagttctgtacagtgac

SEQ ID NO: 1596 - DNA, 201 bp, Homo sapiens
aactgtgacaaattggcatagaactagacacctactttatgccaatgtcaaattcctggtttttatgttgtactctaattacgtaagatgtaaccattagrggaaactggaaaaagagcacatgggattcttctgttctatcattgtagacttcctgtgactctagaaccatttcaaaagagaaagttcaaaaattcagtc

SEQ ID NO: 1597 - DNA, 201 bp, Homo sapiens
gtccacagagagatgaaacagctgcaaccgcttctccctcaaggtgggatcatcaacgggcagagctcctactgtgcccaccaccttctcttcagattcasccacccagaagcaggagccacactcactcaggtaggatttggtgatgtcagacatgtctgtgcgcaatgctatgtctacataccgcgtccagggtttttt

SEQ ID NO: 1598 - DNA, 201 bp, Homo sapiens
tgagtgacagtgagcactgcccacagagggggtgccctgcagtcaggaggggtgggaaacgggtgcagatcggcagccaacagaggcccacccacatgagyacaggtggagttgctggtgcgatgaagagtgtgctggttgggagtggagggctgggggccggtagccggtttgggaaacccaagctgagcgaaaggtgtg

SEQ ID NO: 1599 - DNA, 201 bp, Homo sapiens
cttgttgaaaagccacctaaaattgtcataagtaagagaggtgatctaatggcccatgaaactgccaactccaggaagacagacagggtgacctgaaagtrggtttgacctgttggtttttctgccattctgtgggtggcatcagcttcctgccaagactggcactgcataggatgtcgggtgtttgccagcccagttgaa

SEQ ID NO: 1600 - DNA, 201 bp, Homo sapiens
aggaactggagctgagtgcagaggacaccatggagcagttttgccacagagtgaaacagggagatgcctggcagctgcagaggagggtgcagtcaaaaagrtttgttacagaactgccgtttgactcagcaatcctattactaggtatatatccagagaaatagaaatcgttctaccatagagatgcatgtgaatgttcat

SEQ ID NO: 1601 - DNA, 201 bp, Homo sapiens
tcagccagtcctacccagaacaccctatttcacagtgcacttcacccctagcctacctggccattccctatccccatagctggctctaagttttcttatcmcctctaacctgctctaaatgctaaggatatgcatctgttgttgatttgtatttagtaggctctgcaagcagggatctttggctcttcggttcactcatgt

SEQ ID NO: 1602 - DNA, 201 bp, Homo sapiens
gtgcagaggacaccatggagcagttttgccacagagtgaaacagggagatgcctggcagctgcagaggagggtgcagtcaaaaagatttgttacagaactrccgtttgactcagcaatcctattactaggtatatatccagagaaatagaaatcgttctaccatagagatgcatgtgaatgttcattgcagcagtattcac

SEQ ID NO: 1603 - DNA, 201 bp, Homo sapiens
gagaacttatgaacacaaagaaggaaacaacagacactggggccttccccagggtggagagtgggaggagggagaggagcagaaaaataattttgagtackagtcttagtacctgggtaatgaaataatctgtaccataaacccccatgacatgaattcaccaatataacaaacctgcacctgtacccctgaacctaaaat

SEQ ID NO: 1604 - DNA, 201 bp, Homo sapiens
gggactgacagtgtgttatgtgctgggcttggcagaagttctctccattgcctcttctgttgtgtcttggtttttaacaatgaactaggaaaggatattaycaactaagagtgagggtcagagaagaggcattgttctttgagggggagagaaatgataagccgttgtccagtagttgcctcttctgttcagtaaggacag

SEQ ID NO: 1605 - DNA, 201 bp, Homo sapiens
cagccgacctggggctccacagctcttgctgccgctggaagttgggccaaggctggtggcacacacaggtgtgttcctgctgttgggatcaccagacaagkctgcttcgccttgggccgatcttttgccccggaccactcagccctaggtactttaggccaatctgctgatcaaggccataagtgcctcataaccaatcag

SEQ ID NO: 1606 - DNA, 201 bp, Homo sapiens
ctcagcttcttggtgcattgagagagtacctacctcaggcaggccacatgcccaaccctttggtgcttctccagggaccatacatcgcagaaatcctgtgwccaagcacaagtttcaggaaaggctccctccagctttattgtaagtttttaggttgctgaggtggcataagtgccaagcataaaaaacagcccagcctcc

SEQ ID NO: 1607 - DNA, 201 bp, Homo sapiens
taaactttactattgttgaactgcctatgttgcctgaactttgactggtttaagttggtttcatttatttcataagaactcttgttaaggggtgcaccttkgtattttgatattattctcttgatagtcataataatagttccctggtgtgctgcatcctctcaagtcataaatgttttgtatgcagccatacattgagaa

SEQ ID NO: 1608 - DNA, 201 bp, Homo sapiens
acaattccgctaatgccaatgcctctccatgttgccaatgagagtcaccccaaaattccaagggaaggatagaaagctatccttgatattctgaacaccaytgctacttgttttcctgcactcactaaaagcaacactttaacttttcctttttttttttttttctgaggcagtctcactctgttgcctaggttggagtgc

SEQ ID NO: 1609 - DNA, 201 bp, Homo sapiens
atgattttggcatgatagggaaactctaagggtttctcacttctagtgggatcaccatcaaaaatggactccagttagataaactcctagtttgctgttaktgatcgaagctcatacctgcagaactgaacctgaatatcaagggaatgcttagcagatatttatgctaaatcagctagtactgaaactgttcagatatgc

SEQ ID NO: 1610 - DNA, 201 bp, Homo sapiens
catgccactgtattactgctgcctgatgatggtgaagaccacaattgcataagtgtagcatcagaaatagtggcccctcatgttaatttacaagttagtcstttggacaatcctgagttaatacttttgttgatgggtcctatgccaaaagctcagaaggaaaatatcagctaggatatgctgttaccaaaatgagttaat

SEQ ID NO: 1611 - DNA, 201 bp, Homo sapiens
cctaaaaagttaaaaactattcaaaattttccttggcctgcaaccaaaagataattaaatagttttcttggacttgcaggatatgtttttagacttgcagratataaaattcctgggttctgaatttttccttaatagcctcaccatttcatgagctccctaaaaaatgctgtaccagagcctttatcttgggatgatagt

SEQ ID NO: 1612 - DNA, 201 bp, Homo sapiens
agcctcaccatttcatgagctccctaaaaaatgctgtaccagagcctttatcttgggatgatagttacgagcaggcttttagctaaataaaattgaccttrtaacagcctccagctttaggacttccaaattgcactaaactgtttacctaattggctcatgaaagtaataatcaggcatttaggagttcttacccaggaa

SEQ ID NO: 1613 - DNA, 201 bp, Homo sapiens
agacacgttttattgggaagctaacaaatcttaagcttcaaagttcctctttcccctgcaccagcaccttacaaaaaaaaaaaaacctactgtggttttayaatttatattttgcaaacaggctctgaaatgtatttacctcaggctccaaaaaacctggatcttccttgagggcagtgctgcctactggatgaaatacag

SEQ ID NO: 1614 - DNA, 201 bp, Homo sapiens
tctactgtgacttctgcatttttgtagctttcctgataaaagcctgggctttccttgtcagacctgaaagattcatttattcattcaacaaacagttcccraggacctgaggtgtgccgggcctggacttggcatgaaggcaccagatgttggaagcgaggctgccgcccaggaggacacacctgatggggctctgggaac

SEQ ID NO: 1615 - DNA, 201 bp, Homo sapiens
ataaacagtgcaatgcacctcatttggaaaaacaaaactggtatctaaaaggatataaattcaatgttaagtgcagactcacagagggcctagatggctgyctggtctttcctgagtctttgaagcttctattttcaaaagctctgtactccacaactcatcatggaacagaaaaatacgtccaaattgtgaaaaaatact

SEQ ID NO: 1616 - DNA, 201 bp, Homo sapiens
agatccctcagagttaaaaaggctatttctgtggttggggtttcaaatcaaattcaagaggttcccatatctgaacccgtccaattgactttggggcactyttcagaaaatcacacttttttactgtatgatagtgctccagtaaatttgctagagggagatttactttcaaagctgaaagggcatagaagactacctatt

SEQ ID NO: 1617 - DNA, 201 bp, Homo sapiens
ctgcccaacttgcaaaatatttatttttcttgctcaattactctgtgaaatttaatttgtctaatggatttcttttaacagaacttataattaaaatggaragcgggtgtaaatatttataaaacttgcagcctggccatgtggtagacaaggaggaatccaagcagcctgctgagcaactacttgctggagacattagca

SEQ ID NO: 1618 - DNA, 201 bp, Homo sapiens
ctcccaaagttctgggattacaggcgtgagccaccatgcctggccttaactgtttcaattaataacctgatcaataccaaaatatagaaaaccagtccaartgatgcctgcaaaagatatattgtgctttcaggcatcatgcactcaagttacgggaattacctatgtgagtacaagtaattgcttgtataatatcaccag

SEQ ID NO: 1619 - DNA, 201 bp, Homo sapiens
ctgtttcaattaataacctgatcaataccaaaatatagaaaaccagtccaagtgatgcctgcaaaagatatattgtgctttcaggcatcatgcactcaagwtacgggaattacctatgtgagtacaagtaattgcttgtataatatcaccagattaaattcaacagggtctctttttactaaatgtgttatacacccttac

SEQ ID NO: 1620 - DNA, 201 bp, Homo sapiens
cagggtctctttttactaaatgtgttatacacccttacaacatactacagggcgagcacaaaaaggtcaatttcccagtggattttgttcaggagctgtgyaggtttattaatgaacaaatctaactgacccctgctcaaatgcaactatgtggccctgtttttcaactcccaagggcctatactgggtctgtggataatc

SEQ ID NO: 1621 - DNA, 201 bp, Homo sapiens
gtgtgtgtgtgtgtgtgtgtgtgtgtgcgcgcttcactctggctgcaggtggacaatggatctgaggaggtgggaatggaagcagctaccccttaaggctmgtgccgcatccaggcaacagcagggcccccagtgcagggatgcaggtgctcactgtacaagagcagctggcccagaggggctggtaggagctaaaatcgg

SEQ ID NO: 1622 - DNA, 201 bp, Homo sapiens
ttgttgatttgtatttagtaggctctgcaagcagggatctttggctcttcggttcactcatgtatgttaagtgcccagaacaagcctgacagatattaggygctcggtaagtgcgtgttgagtgagtaaacaacagacagccagtttgggtattcccagtagggcaggaacagagaagagacacgttttattgggaagcta

SEQ ID NO: 1623 - DNA, 201 bp, Homo sapiens
tgtaaaaatcaataattataaaagtatttaggtaaagtaattatgaaaacattgtatgcatagaagtgcatgagtgaataattctagagttttatgtttgwtattcctaagcaatgccaacattttcttattgatgactgacttgagagaaacagattttcaaacatttggatgattctgaattatctgttatcacttaag

SEQ ID NO: 1624 - DNA, 201 bp, Homo sapiens
catgtataagacagtggtaacaagtcacaagaggaaagtaagaggaaacatctaaaaggaacaggagctgacatggtgtcagagatgagtacagagcaggkctcatcatcccatatgcatttgggtaaaagcaagaagcaggaacaaatgtagaggtcaaatggtggaggaggccagaaaatgtctcagacagtcactgtc

SEQ ID NO: 1625 - DNA, 201 bp, Homo sapiens
agtcatagaagagtacgtagcatgattctattatcatacttaagtcaaggtaaaagtaaatgacatattgtttagaaattcaaatgcagtggaaaaattawaaccaaaaatgtcagcgatcagttgggtgcagtggctcatgcctataatcccagaacttcaggaggccaaggcaaggagattgctcgagttcaggagttt

SEQ ID NO: 1626 - DNA, 201 bp, Homo sapiens; identical to SEQ ID NO: 944

SEQ ID NO: 1627 - DNA, 201 bp, Homo sapiens; identical to SEQ ID NO: 945

SEQ ID NO: 1628 - DNA, 201 bp, Homo sapiens
cttcattcctttttatgacccccaaattatttttcatagttgaataattggttgtctctcctgctaaaatgtaagtcctacaaaaccagaaaccatgtctyattgcttcccatatcacacagagaggtgatcaaaaatgatttgttgaactactaacaaatcaaaaaagtgaacttggctcaaagcctatgcaatacatca

SEQ ID NO: 1629 - DNA, 201 bp, Homo sapiens
gagccatgattgcaccactgtacttcagcctgggtgacagagcaagaccctgtctcaaaaaaaaaaaaaatgtcaaacagctgtgactaatattaaataasatctgtcagctaattctgatattaccttgcatgaggtttttagacttcaatggcttatacacaattttaaccaatatttacttagagtacaaagttttaa

SEQ ID NO: 1630 - DNA, 201 bp, Homo sapiens
gcatagccctcatccaagtagacattccaagctgaacatacacataaaaccttttctttttcttgtgacaggaagtcctacttttttctaaatcccaggaytgctctgcctttccacatacttgttttaaagtagtcacacatttcaccagaaacaaagtcctggttgctttctgtcacagctgagagcactgactctgaa

SEQ ID NO: 1631 - DNA, 201 bp, Homo sapiens
gccacaataggctcataagctcctgagcacaggactctggctccacagccactctgagcatttgtgtcctggaacccagcaccaatgccgttgcttaaggstcatgtcagacatgacaccaagagggatcccctcaactaagattacccattatagggaaaacaagaagaaaaggtcccaaaagccctcacctctgaggac

SEQ ID NO: 1632 - DNA, 201 bp, Homo sapiens
tgttgttagtgccagtattatttgagtctgagcttgatgagaaacctgaaataggctcagtgacagcaaaaagtgaaggtcaaggcagagtggaaagtagkatagctaagtgttgaaggcatacaatataatcatatataacatcgtgataaacatccttattcacaaactttgtaaacctctctgcttcttttgctaaat

SEQ ID NO: 1633 - DNA, 201 bp, Homo sapiens
atatataacatcgtgataaacatccttattcacaaactttgtaaacctctctgcttcttttgctaaattccccaaagtagaaacaatgctgggtcaaagcrtaaccttctttactgctctctgtagggaaatcctgtcagggggttccccaaagactgaactaacctgccctctaccttcatgttatttttcccacagtaa

SEQ ID NO: 1634 - DNA, 201 bp, Homo sapiens
ctctaccttcatgttatttttcccacagtaatgctcaattgataaatctcactcctagttttaatgtttttatcaataataaggctgaatttttaaaattktattggtcctttgtgtgtctttcaacaaattattatatcacttacactgcccatttttcttaaaaatattaagtagctctttatagcttattatctatac

SEQ ID NO: 1635 - DNA, 201 bp, Homo sapiens
aatttttaaaattgtattggtcctttgtgtgtctttcaacaaattattatatcacttacactgcccatttttcttaaaaatattaagtagctctttatagyttattatctatactatatgttgtaagtacttttttccatcatgattgcttgatttctaatttgggatgcagtgtttctgattaattaaatgttagatttg

SEQ ID NO: 1636 - DNA, 201 bp, Homo sapiens
ccaagtgactcctttgcacaataaaatgagaaccactgcttccatcaataaacgtccaaaacttggccatctcactcctaccactaaccactctcatgatraaaaaaggatgggaaacataaattcagtgacagggaagggaaggcagcgactactgaaagcctaaaacaaaacaagcccaatctaggctttctttgggta

SEQ ID NO: 1637 - DNA, 201 bp, Homo sapiens
aggctttctttgggtagagagaactccctagattactccaaaatcaggtaattcaacaaaacaaagacctttgcttattgggtttatgtttttaatcaagmaatataaatactatatgtattttataggtttctttggaggggaaatcttttagaatctatacaaccaatttgtgctatggcccctgacattttttccatt

SEQ ID NO: 1638 - DNA, 201 bp, Homo sapiens
attttttgttcttgcagaactttaggataatcttgccaagtttaatttcccatgggttttgactagatttgcgctaacatcggtaaacttatattgaatcrttcaattcacgaacatgttacaactctccatttattcaggtcttcttttatgtacctccataaaatttaatagttctctttccaaaagtcctgcacattt

SEQ ID NO: 1639 - DNA, 201 bp, Homo sapiens
tattcaggtcttcttttatgtacctccataaaatttaatagttctctttccaaaagtcctgcacatttcctagtcgctttattcctaagttgtctatattkctgttgttatagcagatgtaatcatttttaaatttttttccttttacttaattatgcagcaatacatgaatacaaagtcattacaaaacattacagaaga

SEQ ID NO: 1640 - DNA, 201 bp, Homo sapiens
ttatagcagatgtaatcatttttaaatttttttccttttacttaattatgcagcaatacatgaatacaaagtcattacaaaacattacagaagagtaaaamcaaacactctggtcattaatcctacaaaccctcactcttcccaccaaaggggacatctataaagagttgggctcatgtccatcaagacaattttccatgc

SEQ ID NO: 1641 - DNA, 201 bp, Homo sapiens
gtgcatagatatggctatacctgtagttgcatattatgctattataagaatttgacaatacatttaatacatttccctactaatggacatttaagtcaccwgaggcttttcacactgaaagcactacttcaccaaacatacatatacatagatttatatacatatttatgccagtatttttgtaggtgagatttataaaga

SEQ ID NO: 1642 - DNA, 201 bp, Homo sapiens
catatgagcattttaagaaattgaaagctactatcaaattgccctgaaagaaggatttaccacctgtgccaacattctgaaaaagtccattttcccatacygtttatattttacattttcactcttaatttttggcaatttgccaaaatgttatgaaatacttgttttttagttaatattacactgaagaactgaggaaga

SEQ ID NO: 1643 - DNA, 201 bp, Homo sapiens
cacctgtgccaacattctgaaaaagtccattttcccataccgtttatattttacattttcactcttaatttttggcaatttgccaaaatgttatgaaatamttgttttttagttaatattacactgaagaactgaggaagatatttatatttgcattggctatatcaatattttctcctacagtctgtcttttcctagctc

SEQ ID NO: 1644 - DNA, 201 bp, Homo sapiens
ttgtgctgtcccttgtcaacagaattttttcattttatatagttaaatctgagctttacaaaatatgtgctttattaacaaaatgttaagtaacaaaatcyagaggtgtatctagtaactattataatttcaaagtagttatgaccacaaacaatatttcaagatatctgcaacaaccataatgctctacgaaaatagcta

SEQ ID NO: 1645 - DNA, 201 bp, Homo sapiens
ccaatctaacagctctaagagaagagctgttctgtaccacacttctcttttccgtatgtcactttcctttttccatccatgactattgcccgaccacgcarcaaccccagagccaccctgaacctattctggttctgagggctgcccaatttgcgaatcattctttgctcaattaactctgttaaatttaatttgtccaaa

SEQ ID NO: 1646 - DNA, 201 bp, Homo sapiens; identical to SEQ ID NO: 948

SEQ ID NO: 1647 - DNA, 201 bp, Homo sapiens
gttctgcatgaaacccttccatgatcataatatgcatctgcttcttgaatgcttattaaagagtcatcacgcatgcggttccatcagcctggaatggctcmcacagcgattcttcctcagggatttttccagatcaccatccctgtaccatcacctccccaaagtctcttacaaagcctctgcatttcccagcagctgcat

SEQ ID NO: 1648 - DNA, 201 bp, Homo sapiens
cacactgccccaaaacactggaggtgggagtgggaaaggaggctatgagagcataaagaaaagaaatattccctcaaccagcttccgatctagctgtaggwaaaagcaacccaactagagagtaaccagcaacttaactgcaagacatgaattaattcaagatttgttcagatagagcaggggcaaagagataactttaag

SEQ ID NO: 1649 - DNA, 201 bp, Homo sapiens
ttgagaatcaagcatgttattttatgtataaaaattcatacaattgttattgcagagtaatattctattaaatggaaaaccacaatttctttttcatttamctagggatgggcatttgaattatttccagtttttggctattatgaaaaaaactgctatgaacattcatacacaagtgtgtgtgtggacccatgttttcac

SEQ ID NO: 1650 - DNA, 201 bp, Homo sapiens
aatttctttttcatttacctagggatgggcatttgaattatttccagtttttggctattatgaaaaaaactgctatgaacattcatacacaagtgtgtgtrtggacccatgttttcactgatcaaggcctaaatacctacggtaagtatacatttaaccttataagaaaatgcaaaactatttttccaaagtagtatcatt

SEQ ID NO: 1651 - DNA, 201 bp, Homo sapiens
cacaggtagtatctttatagcagtgtgagaacggactgataacatccacattgattggtattatcaatcttttaaattgtagccatcctagtggatatgtrgtatcttacagtggttttaatttaatttatctggtgtctggtgatattgtgcatcttttcatgtgcttattggccacttcctcctctttttaatccatct

SEQ ID NO: 1652 - DNA, 201 bp, Homo sapiens; identical to SEQ ID NO: 949

SEQ ID NO: 1653 - DNA, 201 bp, Homo sapiens
attactccatatgtcattagagaaaatacaggatgcctggagttataatgtgcaaaaggcatacacatatatctcaccagtaagttgagagttactatgamgtctctttgaactttgccagcattttagaaaaatgactcaaacttttgctggcatgggcaaaaataaagcagagtcacagcactgacagtcctttgatat

SEQ ID NO: 1654 - DNA, 201 bp, Homo sapiens
agcaggaagctacacaggtctccgcataaggttatatatgaagaattgtaatacaaagtgcaggtccacaaaggggagaaaaatgccatgtaatcagtacmaatatataactagatagaataagattgagtatttgacagcacaactgggtgactatagtcaacaataacttattgtacattttaaaataactggtcaggt

SEQ ID NO: 1655 - DNA, 201 bp, Homo sapiens
tgcatctttgcttggcccacccacagtctgagagctgttctggccctgggcaaaaaaatgaggaagaattcagtatcacactcaattttactgttaaagcrttccattatcctgcctgcacctttagatttggatgctttggagcccaggctacatggatccctgggcctttctttgatcgccctcccctgccctattttt

SEQ ID NO: 1656 - DNA, 201 bp, Homo sapiens
aacaaaatccagaggtgtatctagtaactattataatttcaaagtagttatgaccacaaacaatatttcaagatatctgcaacaaccataatgctctacgraaatagctagtatttctactgttgacaaaatccaggtcctgctaatactactgaggtttgccacattgtaattaaaggaaacagtaaattttagatgtgg

SEQ ID NO: 1657 - DNA, 201 bp, Homo sapiens
acagaaaatttccaaggtgttggtttcttaagctgggtaaagggtacatgagtgttttttttattataactaacctgtacctatatgtattctgtgtactsttatgaagataatgtgcttcccaataaaaattgtaaggttaaaaagtgagttaacattatcagtgataagccatgttgatagcatgtacttctgatatga

SEQ ID NO: 1658 - DNA, 201 bp, Homo sapiens
gagtaatcatcaaaactaccaaagtcatcaaaaccaaggaaagtctgggaaactgtcacagaccagaggaacccagggagacatgctgcataaaggtaacrtggtgtcctgaatgggatctcgcaatggagaaaggacaagagggaaaactagggatattaagaatggagttcaatccatagtaatgcaccaaggtttgtt

SEQ ID NO: 1659 - DNA, 201 bp, Homo sapiens
aaactagggatattaagaatggagttcaatccatagtaatgcaccaaggtttgtttctttgttttgacaaatgcaccatggaaatatacgaggttaacaayagggaaaactagatgaggggtacacagagaatctgtactatccttgcaattcttctgtaaatctaaaacaattctaaaaaaattataaaacttattagaa

SEQ ID NO: 1660 - DNA, 201 bp, Homo sapiens; identical to SEQ ID NO: 961

SEQ ID NO: 1661 - DNA, 201 bp, Homo sapiens
gaaaaaatgttatgttgtacccttcttatccctacaggctaagaagttgtaagaccaaagaacacagtattaaagaagatataaagagaggcatttaaaawaatcacaattgaaccctacactccttgccacataactcagactctttcagtttcaccaaataatgtctttcacatgtttattactccatatgtcattaga

SEQ ID NO: 1662 - DNA, 201 bp, Homo sapiens
atttgggctaaaatttgtataaatcagaaaggattcttttactgttttatggttcaatatggtagctagtagccacacttggttactaagtgcttgaaatrtggctgtattacaatgcacatggaggtatattgtaagtataaaatacacaggggatttcaaaacttaatttgaaaacaaagtatgtaaaatatctcaata

SEQ ID NO: 1663 - DNA, 201 bp, Homo sapiens
tttattttggagtatgtgatgtgatatatacatatacaataaacatatactgtaaacatgtatttggctcgtatacatgaagtaggaaccagcatgtccaratttttatttgggctaaaatttgtataaatcagaaaggattcttttactgttttatggttcaatatggtagctagtagccacacttggttactaagtgct

SEQ ID NO: 1664 - DNA, 201 bp, Homo sapiens
aatggagtaatagaatgaaaaaaaaaaagatgagaaaaagacagaaaatctcaatcaatccaacagctgtgccccagatccagtcctaacccttctccacyaggatctgtgcccttcaagcctaatcttgcatggaccacagactgaggttcctttgcttctggagtgagctcagccatccaataggagaaaggataagaa

SEQ ID NO: 1665 - DNA, 201 bp, Homo sapiens
catgtcttcttcaattagtttttagtggcagacagtgtaaggctgtagtgaatacctaacagagaaaagttgccatcagttggtgacagtaatagtaccawagattctttaaagtcacctgttttctcactttgcagtctttagattgggaggcattccattcatcatgatgatctaggtaacataagggaataagcagga

SEQ ID NO: 1666 - DNA, 201 bp, Homo sapiens
actgccaacccccaccccagaccccgcttctactggcctattgccaccaaagtccttgagtgactaacaggtgacaaaaaattctagttcattttatcgcwtctaaaaatacactgatatatctcatgtcttcttcaattagtttttagtggcagacagtgtaaggctgtagtgaatacctaacagagaaaagttgccatc

SEQ ID NO: 1667 - DNA, 201 bp, Homo sapiens; identical to SEQ ID NO: 963

SEQ ID NO: 1668 - DNA, 201 bp, Homo sapiens; identical to SEQ ID NO: 964

SEQ ID NO: 1669 - DNA, 201 bp, Homo sapiens; identical to SEQ ID NO: 965

SEQ ID NO: 1670 - DNA, 201 bp, Homo sapiens
ttagaatgatctgaacctgtgttggcagtcatgccattggggaacacagccattcaacagtggaagtacttgccttccttgacagctgctaagaaggtgaygccgcggctacagctcccagatgagctcatgtgggtatggcaaaaggttcacccctgtaacatactgtcctctttagcagctgttcaactgcctaacaca

SEQ ID NO: 1671 - DNA, 201 bp, Homo sapiens
aaaactagaaaaaggcattcatttcaagcctgggcagcatcaaaaatccaaaagcactccccaggaacatgagtctgtttccatgtgccctagggattctrgtcaggcatatggagacccaaggcaggataaaattaaaatatgaccccacaggatcctccctggggaacgtgggaaataattcccctggatgaagagtta

SEQ ID NO: 1672 - DNA, 201 bp, Homo sapiens
ctgggcagcatcaaaaatccaaaagcactccccaggaacatgagtctgtttccatgtgccctagggattctagtcaggcatatggagacccaaggcaggayaaaattaaaatatgaccccacaggatcctccctggggaacgtgggaaataattcccctggatgaagagttaactccaaaaggagtctcttccgtagagca

SEQ ID NO: 1673 - DNA, 201 bp, Homo sapiens
cccacttatctaaaacaattacttataggaattcaatttcaggatcatctagtacattgcttttggggattcaatttcatcttttcactctaaattcccasttgttccagcaccattttttacaaaagaccatcctaccctgtggccctgcagagccacttctgaaataaatcaagtgtccacacgtgcaagtgcttctgg

SEQ ID NO: 1674 - DNA, 201 bp, Homo sapiens
aggatcatctagtacattgcttttggggattcaatttcatcttttcactctaaattcccagttgttccagcaccattttttacaaaagaccatcctacccygtggccctgcagagccacttctgaaataaatcaagtgtccacacgtgcaagtgcttctgggctctcttctgttccattgattgatctgtctattcccaca

SEQ ID NO: 1675 - DNA, 201 bp, Homo sapiens
gattacaggcatgaatcactgcgccaggccagtacccgttgttttaagccactcagtttgtgataatttgttgcatagccctaggcaactaacgcactccyctcactaggctcctgcagtggcctcgctgctctcactggctccaggccaccttctatctcttgtggttttcctacactttgtccatgccttcatatatag

SEQ ID NO: 1676 - DNA, 201 bp, Homo sapiens
ggaaaaaagaaacacaaaaatcttgacaaagagaaagtgcatatgatgatagatgaagatagtcaatccaaatatcagtcatagacatggataaacgtcawgaagtaaaactgagcaaaataaatcaagttacagagaatacatacaaaattatatgtttacatgaaattcaaaaactggcaaataatgggctgggcatga

SEQ ID NO: 1677 - DNA, 201 bp, Homo sapiens
ttcaattttgcaaactccttggtccaaagtcatctatttattgaattctttcctaaccaccttctggcaaagttaactattcttcctctgtgatcccacakctgtctacacttgtactcacagaatgctccgtgccaagtgcttcactttccttatctcatttccctcaaaagacagctcctggaggaaaggactagagtg

SEQ ID NO: 1678 - DNA, 201 bp, Homo sapiens
atctatttattgaattctttcctaaccaccttctggcaaagttaactattcttcctctgtgatcccacatctgtctacacttgtactcacagaatgctccrtgccaagtgcttcactttccttatctcatttccctcaaaagacagctcctggaggaaaggactagagtgagacgaagctgatggagccagtgccctgcct

SEQ ID NO: 1679 - DNA, 201 bp, Homo sapiens
tctttgagagcaaaaaagataacattctgaatcagcattttgggaagcaaagggattacacagttcatgaattaattaaacacagtaaataatgttctttwtccccaaccttcttaaatcaaatacatgtaaagtctattttttaaaagcacacagtatgcaaaatatttgtcataaaataaaagtaaactgaaaattggt

SEQ ID NO: 1680 - DNA, 201 bp, Homo sapiens
attaaaaaaaaaaactataacacaacatttatcagttagcaaaactcaatttaatatagtttaaaactattaaatttgtactgaatgagctacgtcaccayttattaggctttttttttaacttgaaagtctcagtgtttataaagcacttcttgttttataaaaacagctatttattaataaacataaatgtacacatat

SEQ ID NO: 1681 - DNA, 201 bp, Homo sapiens; identical to SEQ ID NO: 967

SEQ ID NO: 1682 - DNA, 201 bp, Homo sapiens; identical to SEQ ID NO: 968

SEQ ID NO: 1683 - DNA, 201 bp, Homo sapiens; identical to SEQ ID NO: 969

SEQ ID NO: 1684 - DNA, 201 bp, Homo sapiens; identical to SEQ ID NO: 970

SEQ ID NO: 1685 - DNA, 201 bp, Homo sapiens; identical to SEQ ID NO: 971

SEQ ID NO: 1686 - DNA, 201 bp, Homo sapiens; identical to SEQ ID NO: 972

SEQ ID NO: 1687 - DNA, 201 bp, Homo sapiens
aaaccttctccttcatcctgttccatcttgagcatataaccagaatgtgacttttggagctattttgaagtagtctagcttagtggttctcaactagggamaagtttgccccccaagaagacatttagtatgtctagagacacttttggttgtcacaactggggaagggtttctactttcatttaatgggttaatttaatg

SEQ ID NO: 1688 - DNA, 201 bp, Homo sapiens
attaaggtttggaaacctattctcaatttagcagctttgcttcatggaggaaaagagaaaaccatgcacatagatctaactatggaagtgtgggatgcacygttttgtataccagctcccaatataatcacttttacagaactgtatatttattgtaaacatactatttaggggacttcttattacattttagagtcccct

SEQ ID NO: 1689 - DNA, 201 bp, Homo sapiens
ctgtatttacatggctgttaaatgatattccatgttacaatccaaatatctacatatactatacaaatatgtgcagatatatgctgaaaactctaaagaarataaaacaaatggaattctctgttttcaagtgttgataattagaatgttcactgattctaaagtttattagactggtggtagtatcagttcaaatactgt

SEQ ID NO: 1690 - DNA, 201 bp, Homo sapiens
agatagagcaggggcaaagagataactttaagggagaaacagaaattcagttaggtataggaattggaaagacaaaagagaaggaagtcattttaagttaygggaacagactaaataccaacatgaaagaagaattagcaaggactgatagaggcaagaagacaatccttgtaattagatctagaaccaaataaggcagga

SEQ ID NO: 1691 - DNA, 201 bp, Homo sapiens
attaaagacatttgacacactgccccaaaacactggaggtgggagtgggaaaggaggctatgagagcataaagaaaagaaatattccctcaaccagcttcygatctagctgtaggaaaaagcaacccaactagagagtaaccagcaacttaactgcaagacatgaattaattcaagatttgttcagatagagcaggggcaa

SEQ ID NO: 1692 - DNA, 201 bp, Homo sapiens
tttttgaattcagactcagtgtcaatgatctcactactctatctccaattttcccaaatacatgggtaaattgtaagtggaagctaatttatcttcaaaartttgaagggcaggatagacactgtctagtttggaaatattaagaatataattcttagtgaatataaataaatagtttttgatttcccataatttttcata

SEQ ID NO: 1693 - DNA, 201 bp, Homo sapiens
ttcttcttgtgatgatgtgagatgacaaaatgcccacatgataaggtaaagtgaggtaaatgacatgggcactgtgacatagcagtaggctactactgaaygtctgatggtatgtcaggagaaggatcatcatctgcttcaagtggtcctggatcaacgagccacgatgatgtcgatggttggatgtcaagagcagatgat

SEQ ID NO: 1694 - DNA, 201 bp, Homo sapiens
gcacttcgagatcagtaattgcaaatctcttgtattactcaggaagagaatattgattaatgttggactttatatatgttaaagtaacgaggctagccacygaaataagaaaaataactatataacttcagacaggggaaagtggtcattttcagatatgattttatgtgtcaaatatacagaaaaatgtcagtctctagt

SEQ ID NO: 1695 - DNA, 201 bp, Homo sapiens
tgtggctttgagtacagaaaatgggaaattccatgcaagtggatcttcaagaggaaaacagttaaagaactatactcctcatgggctgaacatgcagaagragccgacccctgggagaaggttaccctggggaaacagcacagaggttgctgagaatccaaagagaaaggcgacagtgggaaagggaggataacatagatg

SEQ ID NO: 1696 - DNA, 201 bp, Homo sapiens; identical to SEQ ID NO: 981

SEQ ID NO: 1697 - DNA, 201 bp, Homo sapiens
gcagaatgatattcaatatcataatccctgtagtccgatgaaatcattctgtcatatgttcatgccaagattattgaatagcatgaaacagttttgaagawacatgcacatttagtcattgtgatgtgtaaaatctggcaggtacacatttaaatgagtctgactaggtagttggtttcaatgcctgaccaccattaccct

SEQ ID NO: 1698 - DNA, 201 bp, Homo sapiens; identical to SEQ ID NO: 982

SEQ ID NO: 1699 - DNA, 201 bp, Homo sapiens
gggattgcattgcatctaaagatcagtttagggcagcattagcatctttacaatattgaaaactagagtgaacagacctcagcttggatgcaggcgggggsagatttaacactaaattttctaagtttggacaattacaggagggtggggatcctgtttactgaaacaaggcagtgtgtatgacttaaagaaatcataaaa

SEQ ID NO: 1700 - DNA, 201 bp, Homo sapiens
ctagaaacaacagatccataaagcttcagatattaaagctgcattgtcagacagaggctttaaaagctgtatattttttgttgctgttgataaggaaaagrtgataaattttaacagataaccgcccaaaaataattaattaatttaaattaattaagtttcaaatttctacttcccagcatgctggtgtaattgggactg

SEQ ID NO: 1701 - DNA, 201 bp, Homo sapiens; identical to SEQ ID NO: 990

SEQ ID NO: 1702 - DNA, 201 bp, Homo sapiens; identical to SEQ ID NO: 991

SEQ ID NO: 1703 - DNA, 201 bp, Homo sapiens; identical to SEQ ID NO: 992

SEQ ID NO: 1704 - DNA, 201 bp, Homo sapiens
aataattaaaaaactagcagggtaaaatatctacagaacatgtaaaaaccctattttcagcctccactttcaactgaaagacataattgaatcactgtatrccattgttcccaaaatgggcttccagaccaagaaaagctcaaatgtgtttaaaaggagaagcaatccagtgagcagaggaataacatatgaatcacaagc

SEQ ID NO: 1705 - DNA, 201 bp, Homo sapiens
agccatctcattgaaccctcatacacaagccccagagaccccaacttgaaacccatcttgctagaggtaataacaaaaatgacccctaaaccaagccaaawtgttattttttttttctggatatgtaaaaggattttactgtaaagaacagaaaaaagaaaaggctctggaacaaatagtagttttccttagaagcctttc

SEQ ID NO: 1706 - DNA, 201 bp, Homo sapiens
ggtaaaaaaagaactccattaggataaaaaaatttcatggaaacacaagagaaaatactgattatttattatttgcctactatgttttcacttgttcattsattcaacaataacttattgtcttcaatgagccagatcccatgctaggtgctagggatatactagcaaacaagatagaaaagatctctgtcctcatggtgg

SEQ ID NO: 1707 - DNA, 201 bp, Homo sapiens
attctcattcgtatgtgggagctaagctaagaggatgcaaaggcataagaatgatacaatgaactttggggacttgggggaaaaggtggggaagtgaaggrtaaaagactatacaatagatactatatacactgtttgggtgacgggtgcaccaaaatctcagaaatcaccactaaataagttattcatgtaaccaaagac

SEQ ID NO: 1708 - DNA, 201 bp, Homo sapiens
caacagttcgctattttcattactttaattttagggtagctttaatatctggttgtacaggcatactcttacaattctttttcaagattttcttggttatkctcacctacattttttgttcttgcagaactttaggataatcttgccaagtttaatttcccatgggttttgactagatttgcgctaacatcggtaaactta

SEQ ID NO: 1709 - DNA, 201 bp, Homo sapiens
tgtcttcttgagaccctggttaatatatctgctttattttccttcttgtacttaagatctaaaataatcttattcatttatttgcttactggggtttattwtcaagactcttctcctccctacaaaaaaataacaataaattccatatggcaggccttttttcttattcaccactatctcctcagcttctagaatagggca

SEQ ID NO: 1710 - DNA, 201 bp, Homo sapiens
tcaagattttcttggttattctcacctacattttttgttcttgcagaactttaggataatcttgccaagtttaatttcccatgggttttgactagatttgrgctaacatcggtaaacttatattgaatcattcaattcacgaacatgttacaactctccatttattcaggtcttcttttatgtacctccataaaatttaat

SEQ ID NO: 1711 - DNA, 201 bp, Homo sapiens; identical to SEQ ID NO: 994

SEQ ID NO: 1712 - DNA, 201 bp, Homo sapiens; identical to SEQ ID NO: 996

SEQ ID NO: 1713 - DNA, 201 bp, Homo sapiens; identical to SEQ ID NO: 997

SEQ ID NO: 1714 - DNA, 201 bp, Homo sapiens; identical to SEQ ID NO: 998

SEQ ID NO: 1715 - DNA, 201 bp, Homo sapiens; identical to SEQ ID NO: 999

SEQ ID NO: 1716 - DNA, 201 bp, Homo sapiens
caagattttcttggttattctcacctacattttttgttcttgcagaactttaggataatcttgccaagtttaatttcccatgggttttgactagatttgcrctaacatcggtaaacttatattgaatcattcaattcacgaacatgttacaactctccatttattcaggtcttcttttatgtacctccataaaatttaata

SEQ ID NO: 1717 - DNA, 201 bp, Homo sapiens
ctgactccagctctttccttcttgggatgctgctgcctcttcctcttacctctgctgcttgagccagtgtgtgctctgctctctgcttccctagccccgcyatccttctcatcccttacatccaagatgtcctcctcctcttgatgctgctgtcttttcttcttgcttttcctgcttcttccatcactgcatgctctgctc

SEQ ID NO: 1718 - DNA, 201 bp, Homo sapiens
tggggagctgcctatcttcaggcaatagatgggtaggtaataggaatcatttccctggggtaaaaagaaccaagaggtggcacaggccatggtcaaaggtsgggagaaaagggagctcaaggagctgaccactacttacttgtgtgctgttcgcccctcacaggcttggagcagcatctcatcagtcagactgttagggga

SEQ ID NO: 1719 - DNA, 201 bp, Homo sapiens
ttccagtcctgtttgccattactagccagctgtgggctcttcagcaaaccacttttcacccttttagccacatctgcaaagcagggatggtccagataatytctcaggtctcctctggcttctaagtcctttgaattagatgtcccctggcccccccaaaatttggcagctcctgacttaagagactgtaccctacctccc

SEQ ID NO: 1720 - DNA, 201 bp, Homo sapiens
tccttgaggagccacagggaggtgtgccatcctgcatactcgaacttggataggagatgggctgctgctgctgggatgtgcagcagctttggcctctctcrcccacagctggctggtgagcagaacaagaagaggaaatgctctggttcatcaggtcttcacagtggacaagtgccagtgactgacagtaaagatgccccg

SEQ ID NO: 1721 - DNA, 201 bp, Homo sapiens
cacctgagttcatggtcctgggttagaagctgcagaaaggactgtgctgactccctcaactaaggggtggtactaccgcttgctcctctcagcagctgacrtcccagagatcagtttcctttctgggagggactcctcattgaggggggtgcagaagacctgcagacctgcatcaaccctggtctttgaggcttcaactcc

SEQ ID NO: 1722 - DNA, 201 bp, Homo sapiens
aaaaacaaaaaaaaaccttccctttacctgtgtcttagcttgggctatcataataaaatatcatagattggatgctcaagcaacaaattaatttcctgacrgttatggggactggaagtcagattagggttccagtatggtgacagagaggaggggcagtgagaggaagaaagtcttataagggcactaattctaccagtt

SEQ ID NO: 1723 - DNA, 201 bp, Homo sapiens
gcaatgcttacctattcgaatattattcacttttctttctgttgaggaaaaaaaaaaggtgagcctgtgtctcacaggattcaatccttagcctaggcagsttctaattttctgacttcattaaccctttgagttcatgataataaagatattatgatcccttgccaacagtactttactatttaaaataattttcacacg

SEQ ID NO: 1724 - DNA, 201 bp, Homo sapiens
agggaaagaagatacagcaaaagggactgcacatgcccctacccctgcaagctgttccttggcctcactgagccacccaagaactaaaacccgagaaaagyatccttttctgcctccccatatcggtatttccgttgacttagcgccccctagaaacttccaaacagaaaaatcgccatttcacaggagagccttgtcata

SEQ ID NO: 1725 - DNA, 201 bp, Homo sapiens
gtgtgccagaacttgtccctttggtactgggggataaaaagacgcataagacacaggtcttgatttaggggaacacccagtctagcctgggaaacttgggrccttgagtgggattagatggaggacatgccagtgggacttggagaaagatacaggatgggtgagacgcggtggctcatgcctgtaatcccagcactttgg

SEQ ID NO: 1726 - DNA, 201 bp, Homo sapiens
tgaaacctgacccctgaaggacagataggaacccgcctgcgtgcggtggcgcgggcactcacactgctgaggggcgacacgcgggtcctgctcgcgctccrctctccggtcgggcatgggctggaagcagcaggtgcacagggcgtggcttccttgcagagggcacacgtaatcctggactgctgaagcacacgcacattc

SEQ ID NO: 1727 - DNA, 201 bp, Homo sapiens
aactgtagtttcggaaaatgtacaaaagagcaaaactgcccctctcggcgggacggccgcatgttacagaaaggcttcgtctctgctgctgatgccaccaygagccctgcccagcgctcaccaggagggcgggctgcggcccccggggctctggggagggtctcactcagagggtaaagctccacagaagagtcaccccag

SEQ ID NO: 1728 - DNA, 201 bp, Homo sapiens
aggctgggattgtcttggcctggtgatggtgcctcttctgtaataacgtcctgacaaatgataaacattgcaatttatactataggactttatagtcgctwgatcaactacaaagaatacatgtgctcatgtgggaaaaaataacatggaatgatgtccctctgtcacagccagagatgccacacccatgacgagtcgaag

SEQ ID NO: 1729 - DNA, 201 bp, Homo sapiens
tcctgtcacagtgccccagtggctggctgctctctggactgctatacagcaatgcttctaccataacattcccaaatgttttctaataatcttaactttgrctttcaaagtgcagacttctccctaaatcatcttcaatgtgaagatttaagctacatttttagaaattattgtcctaccaggacagagggctttcttttt

SEQ ID NO: 1730 - DNA, 201 bp, Homo sapiens
acaggcggaagccaaggtgcccctcaggctctgtagggtcttggaggaagggcccgggcagcatgagggagcggcgcgtcctgggacctgcctccagcccygggcttggggccgtggtcactcacacaagggagcagcacgtcctgggacctgcgtccagccccaggctcggggccgcggtcactcacacaagggagcagc

SEQ ID NO: 1731 - DNA, 201 bp, Homo sapiens
actctggaaatactcataggaacagtgtaaatacgtaacgatgcacacatccacgcacccctcaccattctctcaagaaatggctcgcccacttctccctractgacagcctaaccagccactacacctcctcacgtgcttggcagctctgctgctgcagggctgggttctctccccgtttgcctcctagtggacccggag

SEQ ID NO: 1732 - DNA, 201 bp, Homo sapiens
ctcagcccttaccactttattggatgccaatcccaacttcaacagccagtgtgtgcaccttactgcttacagctttctctgaacatggaaacttacttacwtgccaatagggcaagtcagaaggccagggaattagccacctaaggcccttacagcccttagacaagtacagttgttagatggtggatcaatgccctagct

SEQ ID NO: 1733 - DNA, 201 bp, Homo sapiens
gtcaataaaagtagtttctaggagactccattttcatagtctagtttgaacactacaaaaagtctgactgtgattggctaggattatgtataactgtaagkaatggaacatttagttctctcttctgaaagtctgaagatagtagcccttctaggttggtatgagcttccatagtatcagggactcagattctgatgtagt

SEQ ID NO: 1734 - DNA, 201 bp, Homo sapiens
ttttaaaggttaggaaactgagactcagagatgtatctattcaaactcatacaaccacttaatactgtaaaagccaaggattttgatctcataattctttrctgtgtaatgtgtccatgcaattgccaaacctttagcattattagaacaattattctggataatctcaagagcagagaatataatggggaaaaggcaacc

SEQ ID NO: 1735 - DNA, 201 bp, Homo sapiens
cataggcttgtattatgcacagagtctctggaaggatgcatttaaacagtaacatagtatatttctgggaagggagactaaaggtcagggtagagaaatcrcttctttttcaaactccatatgccattttagctgttgaatttttttaaccacattgcgtgtattacttctcaaaaactgtttttaatgtttaaaaaagct

SEQ ID NO: 1736 - DNA, 201 bp, Homo sapiens
cttttaaaaataccaggcttttcatagaaataaaggactggaagccacattcattgcaatttaactcttttattttaaaggttaggaaactgagactcagmgatgtatctattcaaactcatacaaccacttaatactgtaaaagccaaggattttgatctcataattctttactgtgtaatgtgtccatgcaattgccaa

SEQ ID NO: 1737 - DNA, 201 bp, Homo sapiens
tacttcttttttctatatttagtcatccatatatcttctagactttctatgtgtcctccttgttatagcttttaacagcccacctgatagcaaactagccrtcttaccctcttaaaacatctctgtttgggggataaagcatttatattttgcatattaaattacatttaatgctgtaactcagacttcctgttttggaga

SEQ ID NO: 1738 - DNA, 201 bp, Homo sapiens
gatttccacatttggtatttgtcatttataaatactgacaatattattaaactattacctttctctttcagctgcagtagactgctcggttccagtaagcrtgagtaccagcataaagtgtaagtaatttttggacattattacctttttaaaaaaaaattaaggtaaatatacataacataaaatttactgtcttaacca

SEQ ID NO: 1739 - DNA, 201 bp, Homo sapiens
ttttcattggtagcttacataaatcatggcttttaaaaattgatttgtgcgtggcagtttgtgaatagtagatgcacttataagagcttttcaaaaattcwttaactgttaaaacttcagattctatttttttaagtggaaaagatattatcaggatagatgaacagattggttaagctttttgttttgctttgtttttca

SEQ ID NO: 1740 - DNA, 201 bp, Homo sapiens
atggaaagtttgcaaaaccagattagctattgcatagcttaaggaaactgtgtgtcctgaattttgcttgaacatttatgtatctaagattcattgagcaytgagctctactttgtgttatgtaacctaggaccctattatgtatactacttgctttctctgtcataataatatgccaagcatagacatttttaataaatt

SEQ ID NO: 1741 - DNA, 201 bp, Homo sapiens
agtgttataaagagcccctgtcacccagtgaggaggggactgtgttagagcagcgttgaaaatagtggttgggaaaaataagtgttctttgtttttacccrcaaatgaattgagactccttcctcaatgaaccaaatttgtcctttagtcaaaatcacaccagtgaagcagcctatgccaatttgaacagatccttgtcta

SEQ ID NO: 1742 - DNA, 201 bp, Homo sapiens
tacagctatttagactgtgaagaataatctgttggtggcacttatcatacatgatatagccagtatacagaaggtctgcctatttacaaatggttatagckctctctgaatggccaggtggatcctgccaaatctgggaagtcatttgttactaacatctttcctagatgattggttggctggctggacaaatggaaggat

SEQ ID NO: 1743 - DNA, 201 bp, Homo sapiens
ttacccaaaagtcattcaggagcaagttggtttaatttccatgtaaaattatgtggttttgaggagtactcttggtattgatttctacctttttttccacygtggtccaaaaatatgtttggcgtggtttcaatttttttacatttattgaaacttgctttgtcttcgagcatgtggttgatcttagagtatgttccacat

SEQ ID NO: 1744 - DNA, 201 bp, Homo sapiens
caagttggtttaatttccatgtaaaattatgtggttttgaggagtactcttggtattgatttctacctttttttccaccgtggtccaaaaatatgtttggygtggtttcaatttttttacatttattgaaacttgctttgtcttcgagcatgtggttgatcttagagtatgttccacatgcagatgagaagaatgtttatt

SEQ ID NO: 1745 - DNA, 201 bp, Homo sapiens
tctgtgtccccacccaaatctcatcttgaattgtaacccaaattgtaatccccacgtgttggggaagggacctcgtgggaggtgactgacttgaccagggmagttcctttgtgctgttctcatgatagtgagatctcgtgagatctgatggttttgtaataggcctttccccccttcactctgcacttctctaattcttct

SEQ ID NO: 1746 - DNA, 201 bp, Homo sapiens
tggattttatactgtagtctactggtttccaaggaaagaaaaaataggatacaaggtagaaattataagatacaaaaatgggaaaagtttcatgctttctrtaagttcagaagcaatttttccatcccatttcagagagatagcttaacatatacttctaccttttaaaaagactttcttcagtgtttcattttgtttatt

SEQ ID NO: 1747 - DNA, 201 bp, Homo sapiens; identical to SEQ ID NO: 1457

SEQ ID NO: 1748 - DNA, 201 bp, Homo sapiens
ttcttaacaagcaatgagttctggccaccaactcctttaggtcatgggttatcacttggtgtttatatgcaatgtgcagcctgggggtgtgtttaattatscctgttactgaaaaggcatagtacctgggcagtgaatacacctggtaacaatactattagcacttattgtcctgatacaattatctcaactccctaccca

SEQ ID NO: 1749 - DNA, 201 bp, Homo sapiens
gaaaactcctgacctggtctcgaactcctgacctcaggtgatctgcccgcctcgacctcccaaagtgctgggattataggcctgaccatgccccaccggcygagattcttaacaagcaatgagttctggccaccaactcctttaggtcatgggttatcacttggtgtttatatgcaatgtgcagcctgggggtgtgtttaa

SEQ ID NO: 1750 - DNA, 201 bp, Homo sapiens
ctttctccttgatgtaattagggttgaaagaattgcaaagtgaatgactttcttatggggtaattcaaagttttttaatgctgtgactgagcaataatgtrtgaaattaaaaaacctcacctgagaggaagcatgttctgctatataatgatgccagcagtacatacctgcctccaacatcttgctaagcagcttttataa

SEQ ID NO: 1751 - DNA, 201 bp, Homo sapiens
ctagcagctatgtcccagggaggttgccgataggatggtgtgctgaccagggccccacacccacctggaatgaatgcctgaagccagcttgcctgggagtrttctcctggatcccattcccatttcctgtgataatagagagctagaagaaaagaagggactgggaaggagggaagatcaagacctaggatgaatttccca

SEQ ID NO: 1752 - DNA, 201 bp, Homo sapiens
aggattgcaggagctacaccaaagaatgggaaagtctagaagcaaacgggagacagaacccaagaagaggaatgaggcaactctgactcaactcccaaggrgccccagaaccccaaattcttcacacatgtcagtccagttctccactatctaactaggccaagtgccccaagacaccatccctgcctagcccaagaccag

SEQ ID NO: 1753 - DNA, 201 bp, Homo sapiens
acccatcaaccctgaggcctggctatggtaccaccgggtggtaggtgcccagcgctgccccatcgtggacaccttctggcaaacagagacagtgagtgaarggtacagaaggctggggcccagggacaatgtgggaagattgactcaaatttctcatctctgacttccccagggtggccacatgttgactccccttcctgg

SEQ ID NO: 1754 - DNA, 201 bp, Homo sapiens
aaaaaatggtcagcagtatgctggaactggcttatatcaaccagtgagagctgattgttgttaaacatttgccagcacatctctggaaacagtgtaaatgkctgaagctctgtggattcctgaggattcaaattctagaagactgtgtagagtgataggtagcaaaaggcttgagggaggataggaggttctagcagcaag

SEQ ID NO: 1755 - DNA, 201 bp, Homo sapiens
accagtaaaaagcaactttatctccaagctttttctcatggacatttcgatccagtacattgtagcagatgttggtagttgctcctttcatccactcaatraagattttccctttagtcacatcaaagttgtaccgaaggaatgggccagggcatggagtcttccagtaaaattccttggcaatgtctccccagaattctg

SEQ ID NO: 1756 - DNA, 201 bp, Homo sapiens
ggccaatggtgccaccagtgttttggtgagaagggagccacctggcctagctgggggatggacaagattatcctgggtgactacctcccaaggctgcttgktctagagggagggggacttatacaatcatctgttttctggagaaagagaagtcctgagggggttgcgtatcctgactaggatggtatcttggcttgtctg

SEQ ID NO: 1757 - DNA, 201 bp, Homo sapiens
gatagagataaatgctgttaagaaaaataaacagggtagcatgatagtgtgtgcagggatggctactgtacacaggatcgtcggagaagacttctctgaaktgacatttgagcagaggcctgaagggtgagaaggaaacaggcatgggaaaatctagagtaagagtgttttgtgcagagggacacagcttgagatgtctga

SEQ ID NO: 1758 - DNA, 201 bp, Homo sapiens
tgtgcagagggacacagcttgagatgtctgaagaatggactgaagcctgtgtggctggagcgtagcaagcaaagggaagaatattacatgacgttggagaygtacataatacagggagggtcttgtgggccatggtgaggagtttgaattttattcaaagtacagtgggaaaccttttttttgttgttgttgttgttgttg

SEQ ID NO: 1759 - DNA, 201 bp, Homo sapiens
cgtagcaagcaaagggaagaatattacatgacgttggagacgtacataatacagggagggtcttgtgggccatggtgaggagtttgaattttattcaaagkacagtgggaaaccttttttttgttgttgttgttgttgttgtttgttttttttttgagacagaatctcactctgtcacccaggctggagtgcggtggcacg

SEQ ID NO: 1760 - DNA, 201 bp, Homo sapiens
tcttattgttaccttcatgctaaagatgatgaaactgagactcatggaagttaaatcacttgcccaaggccacactgctagaaaggtggcatttaaactcyagcaggctcattctacagcctgagttccataagataaaatgagagagtaaagagacaagtgtgttgagagcaagagaagcagtgaacctgaggctgtctc

SEQ ID NO: 1761 - DNA, 201 bp, Homo sapiens
aagccagttcacaactgttatgtatgtcccatcttggttgccttccctcctgggctcctgccagggactctcattcctccctgtgatccagtaagagcatyagtgggtggctaaggattgaaacttcagggttccacctgtagagactggtctagggggaccctgattacagaccagtcacttccctgctctaatacatct

SEQ ID NO: 1762 - DNA, 201 bp, Homo sapiens
atacaaatgttggctcgaaattaccgagcagcagaatcatactgccatgtgtagtaaaacacactttatatttccactgcttaaagcagctgaaaccagamtgaaaaaatttttaatggcaggggtgaaggtgaaaacgcaaacatgtaaaatgatgagtctgattaagacacaggctttttaaatgtcttttccttttct

SEQ ID NO: 1763 - DNA, 201 bp, Homo sapiens
aaaacatgtcaggcagttccaatctctaggtcaagagagacaggcattctctgttgagctggaagaggaaactaaggcccaggacagggtaggtgtgcctrttgtcgcttggtgagtcagggctgtattaggaccagaagtctcactcctgactactgaataaaaggcctagcttcaggctgatatccatcatgacacatc

SEQ ID NO: 1764 - DNA, 201 bp, Homo sapiens
taatggaaattacgcggtataagactgaacgagttactacgatgtcaagttgttttatttatttttttaacttgggctgggattgtattagtaatagttcmgaagttctgatagatggttccatgtctgttaaaatgtatgaggaaaatcggccaggagcagtggctcacgcctgtaatcccagcactttgggaggccgag

SEQ ID NO: 1765 - DNA, 201 bp, Homo sapiens
gttgggatttgaaccaagacagtttgactgcagaatccatatcctaatagcaatgctattcctcttccatgaccccacagaatgcatttcaccaaattccrtcaaatacagaatttctaccagggaagcagcctcctaatttgtcctctcttgcctagtttcgccaacttgagtctttccagtagatttatcaagacacca

SEQ ID NO: 1766 - DNA, 201 bp, Homo sapiens
tatgcctactattatcacttgaaaatatttttgagtatttgtactctcgttattagctgcgtggtccttggcagagtttcctgtgcttcctgagcttcagytttctcatctataaaattaggataattaatgtatactttgtaagaccataatgtcataaagattaaatgagattagtccagtccctgatacatgaatggc

SEQ ID NO: 1767 - DNA, 201 bp, Homo sapiens
aagctaagtgatttgcctaagggtcatacacctgtttgaagacagaactgagactaatctccagatactctcactcctagtcaactattttttttcactcrtgacactacctcattattctagtagtccagcacttggctgtgacagataaaaagagaaattagccacattagccaaactgatttaaattaactttaaaat

SEQ ID NO: 1768 - DNA, 201 bp, Homo sapiens
ggaggttatagtccagcttgaggagacagacaataaacatagaaaccagtaagtatatgacaggtagtgatgagtactatagaaaaatatagagcagagtsaggggaaagggaagtgacagtgcagagtgggagctgataaggaaagaaccttttgataaatatgacatttgagcagagatctgaaggaaagtatggagtg

SEQ ID NO: 1769 - DNA, 201 bp, Homo sapiens
tgcctgagggttgtttgtggctggtagcataaatactcaaagctaatgggagatacatgggaaatacctgttgttgggaacagtctttctccacttgaatsaggtgagcagattgtggaggtgagctggaggatttcatgtttaaggtggatttctaacctgcttctctcatttctccctgagttttatgacccttgacac

SEQ ID NO: 1770 - DNA, 201 bp, Homo sapiens
agtattccagctatggtctgacttgaacagggtactattaccattctttcactttacatatctaagattatattagcctcattgacagccacactctccastcagtttataatctctcataatacttaagattttccttttctttctctctttctctctccttttcctttttcctctttctcctttcatttccttcccttt

SEQ ID NO: 1771 - DNA, 201 bp, Homo sapiens
ctgcaaatttagctcatataatttatagaagacatctaccatacaacctgttttgcatagccagttatcacccaacataatcagccaaatcagatctactktgttagaaattgcctaacttctttcttaagataaatatgttaatatatgactctgtgataactgtttcacttctgagttgtaattctaagagatataagg

SEQ ID NO: 1772 - DNA, 201 bp, Homo sapiens
tttccttatgctaattctgaatttggaaacaataccccccttttggaggccatgtcatttaggaggagaaggccctgaactagacatttagactcaagaaytgtgctatccaacatggaagccactagctacatgtaactattgatatttatagtaattaaaattaagtaaaataaataatccagttcttccgccacattt

SEQ ID NO: 1773 - DNA, 201 bp, Homo sapiens
gaggctgaggtgggagaatcatttgagcccgagagtttaagaccagcctgggcaacatagtgagacattgtctcaaaaaaaaaaaaaaaaaaaaaagttgkggggtagcaccagtcttccctgtcattagtcaattaccagtctttcaattattcaaccatgaccctcgaatacctattgtgccaattgtgcttggaggag

SEQ ID NO: 1774 - DNA, 201 bp, Homo sapiens
agatgtgaagagaggtagtctaattctaaatggattttgaatcaataatgggttaaagtaaatttcgagagtgtgagaatgaagtagttggagaagactcyttggaggaggttccctaggggaagaagatgagaaggactagtgactgtgtaccatgggttgtcacaccaaccatatggcctccaggtgaaggaaaagtag

SEQ ID NO: 1775 - DNA, 201 bp, Homo sapiens
aattcaaacttcttactattgcctacaaggctctacgtgatttggctgctgcctacctctcattcttacccaacttcttgctcactgaaatctagccataytgtctttctttctttctttgaaaaggtctcagtgccttttcacttgatgctccttttccccagaatactcttcccaagaattagtatgattgcctacctc

SEQ ID NO: 1776 - DNA, 201 bp, Homo sapiens
ggcgtgagccaccgcgcccagccccacactcttaagtttaactcccagtagtcactgaactaacctctgtctctcctgacattcatcagtcttcctcatcycaccccaacctctacccttggggcaatccaaggcttgatgtttactagataatacttttttcttttggtgtttaccacatcctgtgagtctgttaaggca

SEQ ID NO: 1777 - DNA, 201 bp, Homo sapiens
ttcctgctgaatggaacctgtcccctcaagcaaaagtctctatgggaaaccctattggtaccagtggtgtaaaggcaggagcagagctagggtaggaaacmcgcagatgtggattgggtctggacatgtaggcaaaagtgcttggaccaagatctgttgacttattttactactaacagggtcaggtgcccacctcacctg

SEQ ID NO: 1778 - DNA, 201 bp, Homo sapiens
tgatcaataataatagcagggttgggggtagcaatctatcagatactgttcaggtaaaggctttccaagaaggtgacatttcagctcagaattgaaggatrggaagggaccagccaagggttcctcctcagcctgaggccaggtgagaggagttctggggtagagatgggggtaggatggcagggtggttggagtactcag

SEQ ID NO: 1779 - DNA, 201 bp, Homo sapiens
gctagttgaaggaacactggaggactgtcggggatttgggggattaagtaaaaggtttataaggagagggtggaaagagtggttgatggctgatattctgrtcatttatactagctactcagtctctactttttctagaagtccccagtaaccaaagcccaacacatttggtatcgttgattccttccattgtttgctttg

SEQ ID NO: 1780 - DNA, 201 bp, Homo sapiens
aattgtgtaacctgaaacaaatgacttagcttctatgaattttatttcttatgaaatgaaatgagggggtgataatctgtaaggttacttccattgttacrgttctaattgcttctctttcctccaaatttttttttttttttttttttttttttgagatagagtcttgttctgttgcctaggctggagtacagtggtgca

SEQ ID NO: 1781 - DNA, 201 bp, Homo sapiens
cttcaaccccaccccatttcactttcccaagagcaagttagtaacagggacagggcttacatccaggccttctgactcagcctagaattccatccattccrtcgatctgctgccaaagaatgttactgattgggcaataattatttacttggtgtgtgggcaccactgttttttaaatgagtgttttcatttgtatcaaac

SEQ ID NO: 1782 - DNA, 201 bp, Homo sapiens
ctcatgctgtcttccccctggtgtggcagataaatatgttagtgggggtgcatgtgtatatgtatgggaaaatgatcagtgacaaggtattgggatagtcmttcagggagagagagtcagtgagggtgttagaggtagctgaaggagtggaagggagttagctagttgaaggaacactggaggactgtcggggatttgggg

SEQ ID NO: 1783 - DNA, 201 bp, Homo sapiens
taaaaagatatcctgtctgccattaaggaactcataatccagtgagggaaacagatgtctacataggactctagtgctagaaaaaaataagtgcccaagtkttgtctttagaaataaacaggctgggcgtggtggctcacgcctgcaatcctagcactttgggaggccaaggcgggcggatcacttgaggtcaagagcctg

SEQ ID NO: 1784 - DNA, 201 bp, Homo sapiens
ttatacaagtgagcgcacataggtgagttggtatgtggtttgcatatggggacacatgtgcttgggtatgtatatgttggcattcagccataaccggagaygttctgaagttcctgtggcacttgtcagtgagccagttaaggaaatggcttttctgcctctggcattcagggccgtttgccagcttcctctctccctgtt

SEQ ID NO: 1785 - DNA, 201 bp, Homo sapiens
taccattgcttagttgggggccagtttgtcactgaaattcactgtccattgtgtctgttgagactctctttagcttctgctctagagctttatgcttgagytccagccaacacttgggctcatttcccaggctctttaaagatcagaaaacctttaaagatcttcaaaggaggccgggcatggtggctcatgcctgtaatc

SEQ ID NO: 1786 - DNA, 201 bp, Homo sapiens
tcagatgaaactctgttttcttgccccagtcaggctcaagccctgtggttgtaggaataaagcctgtgatctcaagaagtggtgacttgttttcttaggtwtctgtgccctgaggctgtatattcattagtggctctgatttgtgtggcagatgggaagggaggggtatttcctaggactatccccaatatcttccttcta

SEQ ID NO: 1787 - DNA, 201 bp, Homo sapiens
tggtcaacaagagcaaaactctgtctcaaaaaaaaaaaaaagtctacctctttaaacactactttccttccttgttatctcaaactcttctaagttttctytgtcgtgttttgaaatctagacccatttcttttttttttttttgagacagagtctcgctctgtcagccaggctggagtgcagtggcatgatctcaactta

SEQ ID NO: 1788 - DNA, 201 bp, Homo sapiens
gcctccatctccaaaaaaaaaaaagtggtgggtgctaagattagacaggtaaagaagggacccaggtggtgggtcctagggcaaggaagttataatttggycctgtgtatagactggtaagccttctgaggctaaatatgtctcagaagattaatgatatctgggcttccatttctgttgcagaattctggggagacattg

SEQ ID NO: 1789 - DNA, 201 bp, Homo sapiens
agagtaagttagacttctatgtattgggagacaggtccctgatatgttgttacttgaaaacaaattatagatttgtgcatggcattttcttaccatttaarcaaaaatcctacacagtcttgtgtcacttaacaatggggacatgttctgagaaatgcatcttagacgattttgtccttgtataaacatagatggtatagc

SEQ ID NO: 1790 - DNA, 201 bp, Homo sapiens
cgcctgtagggaaaataattattctcataaaatactggttaaaggtaagaactacacttatgggaaggatagcattaaggaagtgtagtagtataggtctrattacttggaaatatccatgcatactaaacaaaagagatcccagcagaacattactcaagatcaacgatgtcacatgttatccaaataattacataatac

SEQ ID NO: 1791 - DNA, 201 bp, Homo sapiens
tctaccaaatattttcttttcccagcaattactcgagactaccttggtcctagctcccttagcttgaaagttccaaagataatggcttgcactctgagtaytaaggatgcactgtactggctgatattctggtatccagcggtaacgttactccggcccttgctttcgtgtttcaggtatatattccctctgcggaactca

SEQ ID NO: 1792 - DNA, 201 bp, Homo sapiens
aaatgtttctaccaaatattttcttttcccagcaattactcgagactaccttggtcctagctcccttagcttgaaagttccaaagataatggcttgcactstgagtattaaggatgcactgtactggctgatattctggtatccagcggtaacgttactccggcccttgctttcgtgtttcaggtatatattccctctgcg

SEQ ID NO: 1793 - DNA, 201 bp, Homo sapiens
gctcctcaggttcactccagtcaggccactcctcagactttttagaacttgatgggaagttttcactgtcctccgaagtattttttacatctgagagtccrtttatgggaaatttaataggctgagaaaatggatcgcctgtagggaaaataattattctcataaaatactggttaaaggtaagaactacacttatgggaa

SEQ ID NO: 1794 - DNA, 201 bp, Homo sapiens
aagaatctccataaacgtgctaagtgccctggaagcactggggtgactaattttgttgggcaggggaatgcctaggggaaggagtcacagaaaggagattraagccagatcttagatgagttcacattttccagaagccaatgggaagaaatgcattccagcaacagaatggcctacaaagaagaagagtgtgaaggaaga

SEQ ID NO: 1795 - DNA, 201 bp, Homo sapiens
actttttagaacttgatgggaagttttcactgtcctccgaagtattttttacatctgagagtccatttatgggaaatttaataggctgagaaaatggatcrcctgtagggaaaataattattctcataaaatactggttaaaggtaagaactacacttatgggaaggatagcattaaggaagtgtagtagtataggtctaa

SEQ ID NO: 1796 - DNA, 201 bp, Homo sapiens
tttctgtggtctcttccacactgctaccaaagtgaactttctagcacacacaaattggcccactcttctttaggggaagcagtttcctaagtaatgagagstttcattgtcttccacatgctcaacatttactctttgacctcagtccaattctgagacctatgatgacaactccatttcagagttaaagtgcttcattcc

SEQ ID NO: 1797 - DNA, 201 bp, Homo sapiens
gggaggcagaggttgcagtaagccgagatcgcaccactgcactccagcctgggtgacagagagaaattccgtttcccagcactccccagaaaaacctaaayggtaaatgaggctgaaggtaggctgcagaaagattgtgaagggccttatatcccatggcaaagaatttggaataaacagcacagaaaggattacatgcta

SEQ ID NO: 1798 - DNA, 201 bp, Homo sapiens
taaaaaaaaagtatgaaaggattcccactgaaaatccccccgagaagttcagaaagagaaattaactttttatttatacttctttatatcatttgactgartatgaccctcctacattacttatataatactaaaaatctaaaaaaatgacacacaaaaagttagaccttttaataattcttaccttctagagaaaggtca

SEQ ID NO: 1799 - DNA, 201 bp, Homo sapiens
taaacttttcaagaaattcacaacttccagaaaatcatttctaaatgccaaaaagagaaggaattcagcagaacagattagagaatgttaaatattgaggycataatcacagactacatcaatataattttcaaccaagaaacattctcctttgccatttaaagattctattacaactaagtagcttatgagacaaatact

SEQ ID NO: 1800 - DNA, 201 bp, Homo sapiens
gtttgaagatcttggttcgttctcctcccacaaccacctctggtccaagcagagagaccagcactgctaggctatgcagagtaattgccacaatggaatcrctagtatcacgcaggcccagcaaaacctaggagcaaatgaggtaataagggttgacaaccacaatacctatctctttcttcccctgtaaatgagcaattg

SEQ ID NO: 1801 - DNA, 201 bp, Homo sapiens
tctcacattattttgtggccagagcttatacctgcatttcatcttggtgtatactaggattgttgttttttacttgtaacagtgaagaaagtgtatattgytatccagtaacagaaaacactatatatctgcttgaaataatcgttaaaactaccaaaggtgtgaccaacaacccaaactctagagaaagtgaggcaagct

SEQ ID NO: 1802 - DNA, 201 bp, Homo sapiens
aacatctctggaataatacacgagttaccaccattgcctctgaagagaggaattagggcactggattcaaggatgggagagggacacctcacccacatacygtacaaactttttaaccatgtgtatgcacttttgtcaacaaagaagatatttctccccactgaaccactaataattctcgttatcatgcgaacttgtaaa

SEQ ID NO: 1803 - DNA, 201 bp, Homo sapiens
ggaggtacctttcctctatcccaccaagtcagctgacacagtaacacctcacggctctgcaatcttccagttccttggctctggcagctcctggccccccmatgcttcactgtcccctacctggaaagagtttgctccaggaaggcagcgttctggctgacagcatccactagcaggttgaagtccatctgcacagcatag

SEQ ID NO: 1804 - DNA, 201 bp, Homo sapiens; identical to SEQ ID NO: 1490

SEQ ID NO: 1805 - DNA, 201 bp, Homo sapiens
gctctgatatgtgtgtcctgcccagcccctcaggcctccacctggagcagcaggcagggggaaggggtcacccaccgctgccggaagtcggtgtagagcarcctgttggggaacccttggcggcagatccggatcccctccaggaccccattgcagcgcagctggtgtagcaccaagaaggcatccatgacccctggacgt

SEQ ID NO: 1806 - DNA, 201 bp, Homo sapiens
agtgggtacagagatgccagcttgggtttgccattgttagaagtgaagatgacacctcagtgctgcagattttgcaggaggggactggagccaagccacaracttttctctgttaggagatgggttcttggagtgggtgtggtgtctgaccatccggggagatggctgaagctggggatctgggaaggctcccagaaggga

SEQ ID NO: 1807 - DNA, 201 bp, Homo sapiens; identical to SEQ ID NO: 1491

SEQ ID NO: 1808 - DNA, 201 bp, Homo sapiens; identical to SEQ ID NO: 1492

SEQ ID NO: 1809 - DNA, 201 bp, Homo sapiens; identical to SEQ ID NO: 1495

SEQ ID NO: 1810 - DNA, 201 bp, Homo sapiens; identical to SEQ ID NO: 1496

SEQ ID NO: 1811 - DNA, 201 bp, Homo sapiens
caggggctgagcctgtattagaacccaggcttgtttcccagcccagccaagtcccagaaaaatccccctgattttatctatttttttttaacctgggatascagcagggaaagcattagaggcaaaaggaaaggattttcatttttccaggaatgctgaagtcaggactgtttgaggggagccctgtgtttctcagactct

SEQ ID NO: 1812 - DNA, 201 bp, Homo sapiens
ccatgactgaccccccaacccaagaagtaaagactctcctgatttggtgtttattattcctatgcaatgtttattgagatataattcatgcaccataaaaytccccctttaaagtgtgcaattcagtggttcttggtatatttacaagattgtacaaccattaccactgtctcattccagaatattttcatcaccacagaa

SEQ ID NO: 1813 - DNA, 201 bp, Homo sapiens
attgttttcaaatattttcaagctgcagttggttgaatacacagatgtggaacccatggatatggaggtcccactgtacttgtctgattgtggccatcctrgttggtcattgtggttttgatttgcattttcctaatgacaaataatgcgcatatcttttcatgtgcttattggtagtttgtatatcttctttggagaagg

SEQ ID NO: 1814 - DNA, 201 bp, Homo sapiens
ccaatctcagtaggcattctgtggtttcccctctgagtgtccttgctctctgtatctggaggtggggtatttttctgggtgtgtcagactctgcgtgactyggtttctccccgtgagctcttcagtctcctgaacctcttactgccttgtccctgtccccgtcagtctctgcacccagcctccctgtctctcagtggagtg

SEQ ID NO: 1815 - DNA, 201 bp, Homo sapiens
atgactttccatgcatcatctcaacaacctggggaggtggggccagcaccagacctagcttcacagggcgccaggctaagagggaccttgtgtttgattcracactctgctgttgccgtcttgaaagttttaattgttttcaacaaggggacccacatcgtcattttgtactggggtctgtaggttatgtagatggtccta

SEQ ID NO: 1816 - DNA, 201 bp, Homo sapiens; identical to SEQ ID NO: 1502

SEQ ID NO: 1817 - DNA, 201 bp, Homo sapiens
cattttggaatgacagttttagaaacagaggacagactggtggttgccaggggttaaagatgggagggaagttagtgtggttctataagggcaacaccttyttattgttagaactgttcagtgtcttggtggcagtggaagatctgtgaattgacacgggtgatgaagtcgtatagaacttaatacatgcagatgtgcgtg

SEQ ID NO: 1818 - DNA, 201 bp, Homo sapiens
aggaccgctgtggcgtccaggcggcaggatgctgggcacctgccctgccgctcctgacttgctgtgtggccttgagcagatccactccctgcccagagctwagtctcctcatttgcaaattagggctaataatgggcacctggcagggcctttgtgcgcactggtaggtatacaggcagacaaacaatgaagacacaccca

SEQ ID NO: 1819 - DNA, 201 bp, Homo sapiens; identical to SEQ ID NO: 1509

SEQ ID NO: 1820 - DNA, 201 bp, Homo sapiens; identical to SEQ ID NO: 1512

SEQ ID NO: 1821 - DNA, 201 bp, Homo sapiens; identical to SEQ ID NO: 307

SEQ ID NO: 1822 - DNA, 201 bp, Homo sapiens
tgggattacaggcatgagccaccgcacctggctcattcctgttttatagatgaggaatcagaagatcaaagagacagagcaactctgagggtttgcacatmggcagttggactccagaactcttaggcatcatgctgtgtggttaacctggctcagccgaatccactagagcaaagaaaagagaggcttgcccaggcttgg

SEQ ID NO: 1823 - DNA, 201 bp, Homo sapiens
gtgtgtggtgagcaagcagggatggatgaccatggcttgcatggaagcctgcaagtgtgcatggaagcgtgtgactgtgcgttgcagtaagcatgcatgtragtgtagttgtgacagcgtttatgtgcttgtgtgtgaaagggcacgtgtgtgagtgggtgtgttggagttgaccatgagtgagccttggtgagtgtgtga

SEQ ID NO: 1824 - DNA, 201 bp, Homo sapiens
tcgtatagaacttaatacatgcagatgtgcgtgcacacacacgctcacaactagtacatgtaaaactgggaaaatctgaataagatcggtacattatatcratgtcaatagtacagagttactgtactattgcttacaattgcatgcgaatatacaattatctcaatagaaattttaattaagaaatgaaatttggctagg

SEQ ID NO: 1825 - DNA, 201 bp, Homo sapiens
tttggggaaagagtaaatggcagatgcagagtccctgagacagaaaggagctggtttagttgtaaactctcagaaggccactgtatctggagtgatatgartgagagggtggggctactgtagatgggctggtcagttggcagggccaggtcaggctgggtctccaggccagggtcaacatataggtctatagccaacatg

SEQ ID NO: 1826 - DNA, 201 bp, Homo sapiens
caatactttcctaccttcaaactagaatatccaattttttcctgcgagtctccatacaaccagaatagaatttgttgttgtctcccacaaatctgcttctyctctgatgaaccccacccaggtacccaagccttgagtacttgtttcctacatctcactctccccaaatcctatggattttgctgcctaagtatatagtac

SEQ ID NO: 1827 - DNA, 201 bp, Homo sapiens
cagagggagtcgcctagtatctggtcttgtgggttgggggatcgtgccctagttcagctcccttgtcactgccatcttccagtgcctgctgccttgggccrccttgaacctccagggtttccagctcctcctccttcaccccagtgccactgccatgatggatgtgagtgaacttggggagtctgcccgctacctccgcca

SEQ ID NO: 1828 - DNA, 201 bp, Homo sapiens
tagaccccaggcgcctaggccacactcaagggggccagggacacagaggggcccccacgttggccactccccacattgggctgcatggctaggtcttgacrgatgagcgcaggcaggcagtgacggggacagggataggctgtaattcacaccctgacccctacacagacacacacagacacacacggaggctcggccaca

SEQ ID NO: 1829 - DNA, 201 bp, Homo sapiens
atttttcaagacaagttgggttgctagattttttgttttaatttcatgatttttttttttaaatgttggctctgactttttaaaaatactctggtgaaaamaactgttaacaatgcttgcccctggtcagggaaacagtggctggaggaaggggacttactctgtactgaatacccttttgaattttgcgccctgttcaaa

SEQ ID NO: 1830 - DNA, 201 bp, Homo sapiens; identical to SEQ ID NO: 1529

SEQ ID NO: 1831 - DNA, 201 bp, Homo sapiens; identical to SEQ ID NO: 1540

SEQ ID NO: 1832 - DNA, 201 bp, Homo sapiens; identical to SEQ ID NO: 1541

SEQ ID NO: 1833 - DNA, 201 bp, Homo sapiens
ctcttgagctcaggtgatccacccgccccagcctcccagagtgctaggattacaggcgttagccactgcgcccggccccttttgactctttaaataaaccrtgtacattatctgactacaggacaggctgagtcctccagtctcccgtgtgtggtcacgggatggggggagatggtggcagataggtgtctggttattccc

SEQ ID NO: 1834 - DNA, 201 bp, Homo sapiens
gagtcttctgaatctggagtggaggaagccctggtgtttgagggtgtgcatgtatgctgggcactcacccaaggaggctgcattgggagccagagggagtygcctagtatctggtcttgtgggttgggggatcgtgccctagttcagctcccttgtcactgccatcttccagtgcctgctgccttgggccgccttgaacct

SEQ ID NO: 1835 - DNA, 201 bp, Homo sapiens
tgagatcccacctctacaaaaaatttttgtaaaattaaaaaacaagggaattgcctaaggatgagaggtcacagtggcctaagtgacccttaggaatgacmctttttctgggactttttcatgatctttatattggtgtgacatgaactttccttgtttaatctactgagtttggagatggtcttaatgataataagaaaa

SEQ ID NO: 1836 - DNA, 201 bp, Homo sapiens
atcacctaaatagacatgagtagagggaagctaaactgtgatacacccacatctggaatactatgcctcagaatgaagatgaccctaatagaaggcattasaaagttctaagacagacaaataaaaaaccaaaaacatatcatagaataatatatatgatacaatttgttttttaaaaaagacgtatttctatatatacct

SEQ ID NO: 1837 - DNA, 201 bp, Homo sapiens
ggggctgtgacacgtggagattgctgacatagctctcctcctctgaccttgacagtggcaataaaaggggtagcagagcttcctgccctcaccgtggtgcygaggtaggtgatcagggctggggttggagccgaagggagggcaggagggtgggcgggtgggtgagggtgcccatgggtggccgcgagtcttctgaatctg

SEQ ID NO: 1838 - DNA, 201 bp, Homo sapiens
gtcaggtgtcttcagtgaccaggatatgttggcctctgtcccccttccaggacttggcacgtgctgtcttctctttggaactctcgccaccactcctgatytgggctcgcgatttcgttccggaagctgtccctgttctccgccccgggcttctacattctacagcccatcacttttccctgtaccgtaggaacagtgttt

SEQ ID NO: 1839 - DNA, 201 bp, Homo sapiens
agtggttctggaagccgatatgagcagcagcaactgctggcattatctaggctctaagaatagcttgggatgaagagtcagaggttgaggccagggaagakgacaggagcctgttcctactgccccctcctgctgcttggcctggaagctgggaagcctgcctcctggctcaccatttgctctgggatggttttgcataga

SEQ ID NO: 1840 - DNA, 201 bp, Homo sapiens
gtgctcccacttccaaatgcacaagtgtgccagataaaatatagagaaataagtgcaaagctacattttcagccatatacattcaaaacaggcaaatctcrcctatggtgatagaagtggcagagtggacctctgaggtagggtacagagtggaggcaccagagagcctctgggaggcaggcgatgccctataccctgagt

SEQ ID NO: 1841 - DNA, 201 bp, Homo sapiens
ctcactgctctgtgctgcctcccaagcttgagacatgttgagactcacatcatgccctccctcttcctaagggccaaggtaagccatgtacggtgaacacytaccacgtaccaggctgaggctgggctactgcagtgtaagggagaccaggcctctgtcctcatggaactgtcatcccagtgcccatgagtgtctgccagc

SEQ ID NO: 1842 - DNA, 201 bp, Homo sapiens
aacatccaaggatacttaagtcccttatataaaatgatgcagtgtttcatatatgcttaagtcccttatataaaatggtgtagtgtttcatataaactatmtgcatcctctcatatgctctttaattttgttttattttattttaaatttaaatttatttttatttattttgagacaaggtctcactctgtcaggctggag

SEQ ID NO: 1843 - DNA, 201 bp, Homo sapiens; identical to SEQ ID NO: 1550

SEQ ID NO: 1844 - DNA, 201 bp, Homo sapiens
atgggccaaggaggggtcagcggcgaattctttcggcctgttggggacccctcgtgtccccacgccagactggacctcccgtatgaacttctcttcgcatyggcggcggcttccgtcacctccgctcccccgatcctattcccagtcgtgtaagccctgctttccttaacccttctccccctcagttccaggggtcacggg

SEQ ID NO: 1845 - DNA, 201 bp, Homo sapiens
ataatacataattataataaatatgatataatatatattccattgtataaaacatataatatatataacggaatattattcaaccttgaaatagaaggagrtcctgacatttatcacaagatgggtggacctggaggacattacgctaagtgaaataagccagacacaaaaagaaaaatattgcatgacgtcacttacatg

SEQ ID NO: 1846 - DNA, 201 bp, Homo sapiens
agtaagtgacaggagcacatcttcttgtccaaaatcattggaaatacataattgtgacagtttcccaaacatattcctttcgttttcaaaataatttttaraagtagtagtgtcttctagtggaggaacttccaaatcaactaactggtccttgaacttaagttttcgctcccttttatcattcaccggttcttgattctg

SEQ ID NO: 1847 - DNA, 201 bp, Homo sapiens
cttcacttttctttgaatcagtatctttattttcattcattttctgtttgtgaaggaaatatgctgtaagattttaaaagataaggtatatgttatgcccrctctagaggaggaatggagtatggagattaatgctgtaggtaagctaattaacacagagaaacacaaaatagaatgttcaaaatgaacatgcacttgaat

SEQ ID NO: 1848 - DNA, 201 bp, Homo sapiens
aaaagcacagtttccccttctgggtagcgtgctcattcactgcctccctttgctgggggtagggggttctcctttcccatgtagctctcaggtgggccacycactacactgctcttccttctgtccatgggtcacgccagccttctagtcaagtttgatgagagaacctggataccttggttgccagtgaaggattcacat

SEQ ID NO: 1849 - DNA, 201 bp, Homo sapiens
tacatgaaagagctcacagactgaaaaagaaaataggcttaaacaaagggagcacagtgtgacacacaaggtacagatttagcttgaaaaatggaggaatkaattaggaggagagtgacaataaaatgatttctacaaagtgttgacatcagagctgacatttttttttttggcgggagggagacctgagttttattatta

SEQ ID NO: 1850 - DNA, 201 bp, Homo sapiens
tctcaaaggttgacagactgacatgcagaaaacaaaaaataaaaagaatgaaaagcaaagacgacctagactaaaagaaaatttttttgtctcttctaacrgcaagcagagacaaacattaaattgcaatatcgtacaatcattcaccatctgtaattcacaatctatagtgacaatcttgagcttctaaaaaaggttgat

SEQ ID NO: 1851 - DNA, 201 bp, Homo sapiens
cagtatggcaattcctcaaaaaattaaaaattgaattaccatatgatccagcaatcccatttccgagcatatacccaaaataatcacaagcaggatcttgraaaaaatatttgtacagtcatgttcatagaagcattcttcacaattgctaaaatgttgaagcaacccaagtgaccattgacagatgaatggataagcaaa

SEQ ID NO: 1852 - DNA, 201 bp, Homo sapiens
tggaaatatcaataaattgaaaactaaaaaagaaatcaaagaaattctagagctgaaaagtacaactgaaatgaaaatcttactgttgggattcaaaagcrtatttggtcaggcagaagaaagaatcagtgaacttaaagataagacaattgaaattgttgtatctgagaaacaaaaaaattaaaaagttaaaagtgaaga

SEQ ID NO: 1853 - DNA, 201 bp, Homo sapiens
ccaagagaggcaatgtaaaattaaatttttagatattcttcaagttatagacttaaggtcttttaaaatggaaggttaaaatgaattgtaatattgagtgyacttcctagatgtggtgtagttgtaatgacctaatgttgctactgcttcagcgcttgaaaaaagacgctcccaaaaaaggttattcactgctaaaggttg

SEQ ID NO: 1854 - DNA, 201 bp, Homo sapiens; identical to SEQ ID NO: 1105

SEQ ID NO: 1855 - DNA, 201 bp, Homo sapiens; identical to SEQ ID NO: 1106

SEQ ID NO: 1856 - DNA, 201 bp, Homo sapiens; identical to SEQ ID NO: 1107

SEQ ID NO: 1857 - DNA, 201 bp, Homo sapiens; identical to SEQ ID NO: 1108

SEQ ID NO: 1858 - DNA, 201 bp, Homo sapiens; identical to SEQ ID NO: 1109

SEQ ID NO: 1859 - DNA, 201 bp, Homo sapiens; identical to SEQ ID NO: 1111

SEQ ID NO: 1860 - DNA, 201 bp, Homo sapiens
atatttttgaccctcagcttctttttttcctaatcaaaaccaaaactttacccaagagagttgccaaagaaaataggatttttgctctagctttgaggcaygtcaaaatggtcaactagaattttctcaaattctgcttatctttatgtataaaggcaaagcaagatgaatttagattgtggtgaaagttgagatgatttt

SEQ ID NO: 1861 - DNA, 201 bp, Homo sapiens
tgaaagcaataatgcaaagctaatacagtttgtgaactaagcttgagccatttttaggacagtctttcacagtcctttcacttactttagtctcataaacycaggtctctgaattcccagcccagaaattaggacgtgataatttcaaaaaagaaaaacagttgtgttgttaaaagtaggtactctgacaccagaaaaaaa

SEQ ID NO: 1862 - DNA, 201 bp, Homo sapiens; identical to SEQ ID NO: 1121

SEQ ID NO: 1863 - DNA, 201 bp, Homo sapiens
actctcacacactgttggaggaactataaattcatattatcttttgggaggttacttttgcatctttaacgaaacatttcactctaagccttcaaacattwtaaattcacctctgaagaacttctcctacagattactgatgttcccatagaatgtacctcttcactacagcactgttaactaacgcaacattggaaccaa

SEQ ID NO: 1864 - DNA, 201 bp, Homo sapiens; identical to SEQ ID NO: 1122

SEQ ID NO: 1865 - DNA, 201 bp, Homo sapiens
gttagaaagacagagtatagcagcccaacccagaaaatatgggcataaaaaagcaaagccttcccctgaaaccaactaaaacatgttaaaagccttagtasttgaagaccatgccttgagccaagttagttataggatacaataaaagtgtatttcagaacaaagagtgtgtgacattcagaaaagagaatccaaatgaaa

SEQ ID NO: 1866 - DNA, 201 bp, Homo sapiens; identical to SEQ ID NO: 1123

SEQ ID NO: 1867 - DNA, 201 bp, Homo sapiens
agatcagatgagccagtttattgatctgagtggtgccagctgatccatcaagtgcagggtctgcaaaatgtctcaggtactgatcttaagggcagtgtatycttaaatattgtagcctctagctgcatgattcctaaaccataatttctaatcctgtggctaatgttagtcctacaaaggcagtctagcgcccaggcaaga

SEQ ID NO: 1868 - DNA, 201 bp, Homo sapiens
ctatttactatgtacaaatacagcacaattatgtgcaaatattgcacaatatactgtacatttatttttgcaaataccccatttaaaaaattataatactyggaatgccatgaggcctgaaggcccatcatcgtccaagaagctatcagcagtatggccatagctgtgttttccgtggtcactgactgaaacataaactcc

SEQ ID NO: 1869 - DNA, 201 bp, Homo sapiens
aatcctttacagacaagcaaatgctgagagattttgtcaccaccaggcctgccttacaagagctcctgaaggaaggactaaatatgtaaaggaaaaacagrtaccaaccactgccgaaacatgccaattgtaaagaccattgacactatgaagaaactgcatcaactaacaggcaaaataaccaactagcatcataatgac

SEQ ID NO: 1870 - DNA, 201 bp, Homo sapiens
agcttccccttagtacattgaaattcaaagtcatgcttgtaactgttaatgaaagcagatttaaagcaacaccaccatcactggagtatttttagttatayacgattgagactaccaagcatgttgctcttattcagtgtaatcctaatctcatgggtatccactgttgggggagaaggtaagttgaaaacagatccgaat

SEQ ID NO: 1871 - DNA, 201 bp, Homo sapiens
gtgaatataccaagaccctcacatagccattctcgaagtcccacctgaacaaaatgattttgaattataattctgttcttcaaacatttcaggaaacgttwcttggcaaaaattattctttttttttttttttttttttttgagacagagtctcgctctgtcgcccaggctggagtgcagtggcgcgatctccactcacgg

SEQ ID NO: 1872 - DNA, 201 bp, Homo sapiens
ttaattctctccgttctctagtttgctaagggtaaatggtcaccaaatagataatgtaaagagaaatcaaaggagagaaaatctgctataataaagatgayaaggtgaaatattagtgtaattctgcataaactctgcaatgccactgactagaaaaatcaaccccaaaagatttggccaccttcattatgttttgagaat

SEQ ID NO: 1873 - DNA, 201 bp, Homo sapiens
ggccaccttcattatgttttgagaattttattttcatagatttgataatttacattttaaatgttattaaaatgaaggaattctcatttcagcctaattaycattcaacagggaaatatattttaatgaaacaatagaaaatattatttttatatataaaccagtgaactgccaaaaaattgtttcttctgagctcttcca

SEQ ID NO: 1874 - DNA, 201 bp, Homo sapiens
aaagagaaatttcccttgatttgtcagctgaatttctgcatgctttttctaaataaggtgaaaaacaaaacaatttcttatgcagcaatgctatattcagraaatatcttgagctaaaaaatgagcacactatattgaggaaatatctcgagctaaaacagcattcaaagataaagtacatcaaatccatagaatgtacaa

SEQ ID NO: 1875 - DNA, 201 bp, Homo sapiens
tattgaggaaatatctcgagctaaaacagcattcaaagataaagtacatcaaatccatagaatgtacaatatcaagagtaaaccctaatgtaaactatggrctttaatgacaataatactgatagtgaagggggctattcatgtggcagggaagaggaagtggtatataggaaatctctgtaccttccactcaattttaca

SEQ ID NO: 1876 - DNA, 201 bp, Homo sapiens
acagaagacttccatgataaaatggaaatgattcttataggatcttgctacttggggagcacaaggaggagattctaagaatcagggagctattttttccyctaggactgactttttcccctgtgattcaattcccacttgacttatggatgacaatttaaaggtgaacaaacgacatcctgtttagaagctgctactctg

SEQ ID NO: 1877 - DNA, 201 bp, Homo sapiens
tttgttaaaagcagacacaaacacacacattaacctcggcctacggagggtcaggatcatcagtatcactgtcttcctcctcactcttgttccactagaargtctttagggcagtaacatgcatggagctgtcctctcctatgataacaaagccttcttctggaatagttcctgaaggacccgcctgaggatgttttacag

SEQ ID NO: 1878 - DNA, 201 bp, Homo sapiens
tatataacactcaaaatgactaaattacagttatgtagaacatactagtgatgactagcaatgaggggtgggggaatgtggggaccataaaaggacagcayacgggagttttctggaggtgatagaatagttctgtatacgactgagtagttctacatatgactgattgtggtgatggttacatgagtgcatacatgttgc

SEQ ID NO: 1879 - DNA, 201 bp, Homo sapiens
aattttatggagactttctggaaaaaatatttcccaacattatgctgtttggccaatttccagagacaaccaatggttacttttaaatttttatccagttktattgctgccttttggttgggagtgaatataccaagaccctcacatagccattctcgaagtcccacctgaacaaaatgattttgaattataattctgttc

SEQ ID NO: 1880 - DNA, 201 bp, Homo sapiens
acattttcagcatgtttgtaggttggtgaatgattaagtggaaagggagacattgatgttacagaagaaaggagataattcatgaagaaggatcttttacwagtttaaaggtgaaagaatctagtgtcatcatgaagaagtcaatctgagaaagcaaggacagtaactcaatgaaactagaggatgtacaagcaatttggg

SEQ ID NO: 1881 - DNA, 201 bp, Homo sapiens
caggtagagaatttatttgcaaaggattgaggttttctaagacttggattacagatagaaaggaacgaatgggcaggagagtgtgtgcaagggactgactkacagtgatgagccatggaatctaatttagatgtggtgggaagagagaaaatgaagggaagagaatagtgaaaaagtgtcagggtcattgaatgtttggaa

SEQ ID NO: 1882 - DNA, 201 bp, Homo sapiens
tatttttatgacttattatatgaatctaagattatttcaaaacaaaaattatttggattatataggctgggatgttttacttttatagcacttttggggawgagaattttcaatattcaagagttataaccaatttcagcaatttttctttgagatacttaaatctatctcaaattttatcagtaataacttctacaagcc

SEQ ID NO: 1883 - DNA, 201 bp, Homo sapiens
tttaaaagggaatttacaactacaaaagtgatattgttgtattaagatgaggactgatgacttgcacttgcttgccttttgaaacagctgaacccttggcwagaaaaaaaaaaaaaacccagggggccggcggtggggagcttcctctctcctctaaacagtccatttctgattgttccaaactcagagactcggtgacta

SEQ ID NO: 1884 - DNA, 201 bp, Homo sapiens
ccggcggtggggagcttcctctctcctctaaacagtccatttctgattgttccaaactcagagactcggtgactacaacaaggaaattgaacagcagttaytttgcttaaataaatattacataacgagctgagaatattattgtgaagacactgattagatactatttgcttatttcacacaaccctccatgaactttga

SEQ ID NO: 1885 - DNA, 201 bp, Homo sapiens
tgatattgttgtattaagatgaggactgatgacttgcacttgcttgccttttgaaacagctgaacccttggctagaaaaaaaaaaaaaacccagggggccrgcggtggggagcttcctctctcctctaaacagtccatttctgattgttccaaactcagagactcggtgactacaacaaggaaattgaacagcagttattt

SEQ ID NO: 1886 - DNA, 201 bp, Homo sapiens
tctgacttactgagtcagagtttttgctgagcttttgaaatgtgagtcattgaacctcaagggggacccagatctatctcttactgatgctttgcttcctrcagacttacccatgtattgcctctttttattatttaaatgttttgaagatatttaagatagtttagtgcaaaacaatcatacatgtgtacattttcagag

SEQ ID NO: 1887 - DNA, 201 bp, Homo sapiens
acctggaatccacaaaaaaaagaggtcccagtttcctagatttataatgctgtgtaagaaacttattggcataaaacagcaatcattttattatacttaargatactgttaggaattgacgcagggcactgaggtgatgacttataactgttccacaatatttgagcctcaggtgaaaagatttaaatgggttaggactca

SEQ ID NO: 1888 - DNA, 201 bp, Homo sapiens
ttcctagatttataatgctgtgtaagaaacttattggcataaaacagcaatcattttattatacttaaagatactgttaggaattgacgcagggcactgakgtgatgacttataactgttccacaatatttgagcctcaggtgaaaagatttaaatgggttaggactcaaataactgagatttggaatctgcaaatgtcac

SEQ ID NO: 1889 - DNA, 201 bp, Homo sapiens
ctgccagacccccaaaatagcctgcaagaatggcgataaaaactgccaccagagccacggggccgtgtccctgaccatgtgtaagctcacctcagggaagyatccgaactgcaggtacaaagagaagcgacagaacaagtcttacgtagtggcctgtaagcctccccagaaaaaggactctcagcaattccacctggttcc

SEQ ID NO: 1890 - DNA, 201 bp, Homo sapiens
tgggaccctgggtcagcagagctacagggacaggacacttacctagagccatggggatggggcattgtagagtcaaaggggcagagccatgggaatgatgytgccaccccagtgggcttagaaagcaagacactaagccaaagaagactatactcaagaattaagatccagtggaatttgccttgccaggtcgtggacttg

SEQ ID NO: 1891 - DNA, 201 bp, Homo sapiens
ttttttaaaaataacaaccctcaaattctaatgtgtaatttgctagtttattatgtttgttgtttgttgtctctctctcatgaagtcaaagatttttgtcrttttgttgatgtattctaagcacctagatagagtagccagtcaataaacatgtgttgaatgaaggagcaaaaagagcctgagcctcttgcagcttttcag

SEQ ID NO: 1892 - DNA, 201 bp, Homo sapiens
ctgatggtataattttgtcctttgcctcccttctctaacattagagaaaagttcccaggtttaaaaccatgttcagtaacctgatccattatccaagataytctctatattggagcaagtcagatcctgtcccaccatttatcagtcgggaatggaagggacataaggagaaacacagagaagccctccggcagctcacca

SEQ ID NO: 1893 - DNA, 201 bp, Homo sapiens
caagagtctcacttcacagtttaaggactcacatagactgaaagtgaaaggatgaaaaaagatactcaatgcaaatggaaaccaaaatagaacaagtgtarctaaacttacatcagataaaataggttttaagtaaaaaactataaaatgagaccaaaaaggtcattgtgtggtgataaaggggtcgattcatcaagaggc

SEQ ID NO: 1894 - DNA, 201 bp, Homo sapiens
tgaaatagaaactagaaaaataatagaaaagatcaacaaaactaaaattcggtattttgaaaagataaaattgacaaacctttaactagactacttaaggmcaaagagggaagacttaaggaaaatcagaagtgaaagaggagacattacaactgataccacagaaatgcaaaagataagactactataaacaattatata

SEQ ID NO: 1895 - DNA, 201 bp, Homo sapiens; identical to SEQ ID NO: 1126

SEQ ID NO: 1896 - DNA, 201 bp, Homo sapiens; identical to SEQ ID NO: 316

SEQ ID NO: 1897 - DNA, 201 bp, Homo sapiens
atattgtctataaaatgtaaattcaaggaccaaagcatttggctaccttattattgtgataaaagcaagccttaaggttggggtagtcatttttctgacaygcaaatttaataagattaataatttacacaatttgcattgaatgcatctgcctttacttctgattatggtacctactctatgacatccatagtgacctgt

SEQ ID NO: 1898 - DNA, 201 bp, Homo sapiens; identical to SEQ ID NO: 1127

SEQ ID NO: 1899 - DNA, 201 bp, Homo sapiens
ttacttataatggcttgagttaaaatgctccaacttttctaatttttgcttttgaaaataaaacacctatagtgacaataaaaacacacatttaaagccawgtggtcatagtgactggagccatgtagtgaattggggctagactagtacgatcaatagcgatacaaaatcacaatgaactgtctgaggcagaaaactttt

SEQ ID NO: 1900 - DNA, 201 bp, Homo sapiens; identical to SEQ ID NO: 1128

SEQ ID NO: 1901 - DNA, 201 bp, Homo sapiens
agcatcatatcatatgaaaatatataaagttgtaaattaggctaacatactgttatataaaatttattctacccacctactttcacaaacatatctttgaratgataacattgaaaaacgggtaagcagctatgggctttatgtaattgaaagatggcaagaaccaaagatggtaagcttagttattattgtacatgtctg

SEQ ID NO: 1902 - DNA, 201 bp, Homo sapiens
ggtatttgcaagacccaggtcaagaggatgaattgaagcatcatatcatatgaaaatatataaagttgtaaattaggctaacatactgttatataaaattkattctacccacctactttcacaaacatatctttgagatgataacattgaaaaacgggtaagcagctatgggctttatgtaattgaaagatggcaagaacc

SEQ ID NO: 1903 - DNA, 201 bp, Homo sapiens
ctaaggctcaaagagaagtataagactaggtctttatatttgtaagttacttacactctagatatcaaacgaaatgtaactcacatgaagtgcttcaatgytgaataggttggtacaaactcaagtgcggtaagtggtaaatctgggctgatgtagtcagaggagacttcctggaggatcttggacatgagctttccaggt

SEQ ID NO: 1904 - DNA, 201 bp, Homo sapiens
aaattcagctctggtcttcccgagtgtaaagccttagccagattatttgtgttgctggagcaggcacacttcacttaaaaaatggactgatataaagcccyagttaattttttttcccagatagctataactcataagagattcagatatgatgagtaaatcatctggatgaacaacttgtgtttagcactgttctttact

SEQ ID NO: 1905 - DNA, 201 bp, Homo sapiens
attagaaagaagcagcaaaactatccttatttgcacacgtgctctcttagaaaaataaattatcagaactaaaaagagagttcaacaagaagtcaacatasatcagtcgctttcctatatgagagaaatatccaattagaaaaattgttgaggccaggtgcagtggctcacacctgtaatcccagcactttgggatgccaa

SEQ ID NO: 1906 - DNA, 201 bp, Homo sapiens
gccttggcactagtcctagctcttacccaccccccaccccgacccaagacactgggttcacagtcaggatgccttgcgtgctagctagagctgatggggcmtttcctagttaaaagacaaattatggaattcttccattaagagatgagtatataacaatatacataaataacaatatgctgaggtacttgtggttgggtt

SEQ ID NO: 1907 - DNA, 201 bp, Homo sapiens
gccgagatcgtgccattgcactccagcctgggtgacaagagcaagacttcatctcaaaaaaaaaaaaaaaagtgcttggcataataaaaatgcttaagtartgttaggttttattattattataattcatagacacataaatttgtatataaaatgttaagattgaatagaaaaccacaaattcctttttgtgtttacttg

SEQ ID NO: 1908 - DNA, 201 bp, Homo sapiens
tgtaactataaggtgttttatatattcctcatggtaagtacaaaacaaaaaacctatattaaatacacaaaaggtgaagagtaagaaatcaaggcatggcrctagagaaagtcacctaattacaaaggaatacagcaagagaggaagaaaggaataaggacctacaaaacaaccataaaacaatgaaccagatgatagtag

SEQ ID NO: 1909 - DNA, 201 bp, Homo sapiens
atattaaataaacatcagtactgtgtcttgcttctatagaattcatttttggttcatatttgcttttactagacaggaagtatagtatagtgcacaaaaayacgaggttcagactgccatgtgcaagttacttagccttttagcccttcagtatctttatttgtaaaacaggcgtaattatgtttatgtgatagggatttg

SEQ ID NO: 1910 - DNA, 201 bp, Homo sapiens
tgagggcaattttaatacatgtattttgagtcccttttacatgctagactctgtgctgtgagttgggaaaatagggatgaataggaaactgctcttcctgrcagagctccttatggtccactggggcagggggagcagggaaggtggacaaggaagggacaaaagatcttagttagatcaacccctctcaggctgtgtcta

SEQ ID NO: 1911 - DNA, 201 bp, Homo sapiens
tgcagtgagtcgaaatggtgccagcctgggcaacagagcgagactctgtctcaaaaaaatttaaatttaaatttaaaatgcccgctgcacgagattcccawggctgctgtacgcattaccacagacttagtggcttaaaaccacataagtgcatcctcctccagttcggcaggtcaagagtccaaaacatgtctcactgga

SEQ ID NO: 1912 - DNA, 201 bp, Homo sapiens
actatatcagcctattccctcatctggaaatgtgtgtttaccttcttcatagacttttggagataatttgagaatttccatgcacagaaacaaggatctartagcctgtgggtacccaagctcctggggtcctgcaggagaaggcggctgggggcctggactcctgggtctgagggaggaggggctgggggcctggactcc

SEQ ID NO: 1913 - DNA, 201 bp, Homo sapiens; identical to SEQ ID NO: 1570

SEQ ID NO: 1914 - DNA, 201 bp, Homo sapiens; identical to SEQ ID NO: 1571

SEQ ID NO: 1915 - DNA, 201 bp, Homo sapiens; identical to SEQ ID NO: 1572

SEQ ID NO: 1916 - DNA, 201 bp, Homo sapiens; identical to SEQ ID NO: 1580

SEQ ID NO: 1917 - DNA, 201 bp, Homo sapiens; identical to SEQ ID NO: 1581

SEQ ID NO: 1918 - DNA, 201 bp, Homo sapiens
tggcatgaacccgggaggcggagcttggagtgagccgagatgtgccactgtcctccagcctgggcgacaaagcaagataccgtctcagaaaaaaaaaaaamcccctctagagaatcccagaaaatagaaggaattattccatttcccggaagaggaacgtgtggctaagagaggaggcatcacctgcccaggtgtgtccag

SEQ ID NO: 1919 - DNA, 201 bp, Homo sapiens
gtgtattcttgagtctatttaaagatgaacaagaatagaaaagctagaggatggtcccagttttacataaaaatatataaatacacacacaaacctattakaaacaagactagaaagatccataaaagtgattctcctggggctggtgcagatcaaagttgtttagttctgtcttcttttttattgagacagagtctcact

SEQ ID NO: 1920 - DNA, 201 bp, Homo sapiens; identical to SEQ ID NO: 1583

SEQ ID NO: 1921 - DNA, 201 bp, Homo sapiens; identical to SEQ ID NO: 1584

SEQ ID NO: 1922 - DNA, 201 bp, Homo sapiens
tctgtctcaaaaaaatttaaatttaaatttaaaatgcccgctgcacgagattcccaaggctgctgtacgcattaccacagacttagtggcttaaaaccacrtaagtgcatcctcctccagttcggcaggtcaagagtccaaaacatgtctcactggaataaatcaaggtattggtagagtcaggttccttctggaggctct

SEQ ID NO: 1923 - DNA, 201 bp, Homo sapiens
actctcaccccacgtgcccctgactgaatgatctcaggcaaccttgtctgagctcactcacataccccaactgaaacacagacatcatcacatcacaccamgggacctctgtcatgttctccataagtggctccacccagtgtctggcgtgtggaacgccttcagcaagtgacagtcattattttataaatgctcactgca

SEQ ID NO: 1924 - DNA, 201 bp, Homo sapiens
agcatggatgtacagatatctctctgagagccaaagcaggggagattttacctctcctggccagttccaaggcggtctgcttcccgatgcctgtgttggcrcccgtcacgatgaccgtcttcccagggatggtggccttgctggggcaagccccaccggtgacatagtccctgagggtgagaagcggcacggtcagtcctg

SEQ ID NO: 1925 - DNA, 201 bp, Homo sapiens; identical to SEQ ID NO: 1588

SEQ ID NO: 1926 - DNA, 201 bp, Homo sapiens; identical to SEQ ID NO: 1591

SEQ ID NO: 1927 - DNA, 201 bp, Homo sapiens
ggcatgaacccgggaggcggagcttggagtgagccgagatgtgccactgtcctccagcctgggcgacaaagcaagataccgtctcagaaaaaaaaaaaaaaccctctagagaatcccagaaaatagaaggaattattccatttcccggaagaggaacgtgtggctaagagaggaggcatcacctgcccaggtgtgtccagc

SEQ ID NO: 1928 - DNA, 201 bp, Homo sapiens
cctaactgtggtagtgaccacgtggttctcctcgctgtgtctcggggaacccccaacagggagcggaaacagggagagcagtctctggctccttctccgtytgccagccctgtctgccaccctcctggccatggtgaccaccttgacagggccaagaacagcccacctcaggcaccgagcacccgtgaccatggtagttgg

SEQ ID NO: 1929 - DNA, 201 bp, Homo sapiens
ttccggtcgtcccttggctcgattttcttccggggcgggacttcctttccatcattgataggcgccgggcagctgagctggtaggaggaccagacggggakgttcggtatgtctgaccaggacttatgttcctcgaaagggcggccaggaggatgctcttcctctcttttctttctcgcctttttctccgcatgacgcctc

SEQ ID NO: 1930 - DNA, 201 bp, Homo sapiens
ctcccctgttattcttcagcttcagtttctcttcgatgtgctgcagaaaacactttcactcaaggttctgggtgtggggaagaggcaggatgtgcaaggakcccaagagaatgatggaagttggggatagggtaggggtgcagaagtctgcagtgccaggatccagagggtgtcagaggtaccagtggttgtgctaaggaa

SEQ ID NO: 1931 - DNA, 201 bp, Homo sapiens
gaacatggctgttgtgtgccctgcactgggctgggcatttctttcagtctctccttggcactaggagccgaggaggggagcctcagaggttgcaagcactygggaagctgggctgaggagcagggattctgtgctggagcttggacgtcagtacaggcctttgacaggcttcagaggtcctgccatcctccatgctctcag

SEQ ID NO: 1932 - DNA, 201 bp, Homo sapiens
agtgatcgtcctgtgtccactcttcttcccctttcctgcccagtcctcccccaccttgcaccctcttgccatccctgggtgaggggccaaggacctggacsctgcttactgtgttcttaatacctggagctcagcaggatgggcctaccacatactccctccccctttttgtctttgctcagttccttctcgatggcaagg

SEQ ID NO: 1933 - DNA, 201 bp, Homo sapiens
tgaggaaccaatgagaatatgaatattaaagtggcttgtaagctggaaagcactacctgcatttaaaataatgaagttatcattgttgttatccttaagarcactggatggagatgatggcgaatgacacagtaatcataagacaggcaggggctacccaggcctgttaacaggagggccattccctcacatcctctctgc

SEQ ID NO: 1934 - DNA, 201 bp, Homo sapiens
gttttggactcagtgacttttccattctccacaaaaacattcttcagtttattagttactataattacttgtgcacttgctttcaattccacagacatttrttgagctcttagaacgtgccaggatgtatgtgagaagatgggggcagggatccaaggatgaatcagatgtgctcctgcctccaaggagcttatggtccag

SEQ ID NO: 1935 - DNA, 201 bp, Homo sapiens
agggaaatcttcatgaaggatgtggagcctgaacagggccttgaaggtggacttgagaaatataacattcattgataacattagatgcatacatttatgaytatcagtattttagaaagaatatataataactgtagaaggtttatttagtttttcattttgtatgtatttctaagcttggtcttggttgctgtcttttct

SEQ ID NO: 1936 - DNA, 201 bp, Homo sapiens
tttctgtgtccattaattaagtatacaagtattcaaaagtaattttatagaacccaaagtcttgaaccaactggcttattgaggcttgagccttctttgcrttgggcgttgccacctttggaagctgtaacactgaagcctagcactgtgggatgctgttggctttgaaaaagaatttcaaatataaagcacatgaagaaa

SEQ ID NO: 1937 - DNA, 201 bp, Homo sapiens
ctttaaattgtaagatcttgttcataggtcctcttggatattctaagtaaataaaacaatcatcatttgcaaatacagatggtttcatctcttcctttcarttattttaccacttttaaaaatatgtcttactgcttagggcttccaatataatattgaacagacatatctctgttttcttgaaattccttgaaaatgcta

SEQ ID NO: 1938 - DNA, 201 bp, Homo sapiens; identical to SEQ ID NO: 322

SEQ ID NO: 1939 - DNA, 201 bp, Homo sapiens
taataagggaatattaacacagcaaaaaataaatgattccattttcctaaggtgatatggagggattttgtcttgaatttatgtgaattcagtgtgagcaygaaggcaaagaatgagtcacagtggctcagggcagaatgatgacatagcaccgtggatgactgtatcagaagcgacattcaggatgtctttgtaacaaca

SEQ ID NO: 1940 - DNA, 201 bp, Homo sapiens
ccaagtggcagttgccatgtagttgtcatagtctgtttatatggaaacttgggtaattactcttgggagcatggtgaacctggtaattattactggttgtwgcctgaaagcttttgttgacacctgctggtaagatcaagaaaatcaagaaaacacaggtatcagcatagcagaatgactgtccataggttggaagaaaat

SEQ ID NO: 1941 - DNA, 201 bp, Homo sapiens
gccatgattgtgaggcctccccagccacatggaagtgtgagtgaattaagcctcttaactttataaattgttcagtctcaggtatgtctttgttagtagtrtgagaacaggctaatacaaaaaattaaaaaattggcctggcacagtggtgcatgcctgtggtcccagctactcaggagtctgaggtagaaggatcacttg

SEQ ID NO: 1942 - DNA, 201 bp, Homo sapiens
taatctcccccttctctgactctcttatcttccatgtcttctgcttttcttttgttcacctaagtcatctataatttgaccacaatgtgagtatagtattwgacacattgtattgtaatttaggtgcctccccctctagaatgttgtggaattaatgtgttcttggcctcatacccacttaggcctggtctccattttcct

SEQ ID NO: 1943 - DNA, 201 bp, Homo sapiens
gttaagaaatcagaggtgttttcatatttagataccttgggtggcctccaaatttctctttaaataaagtatttaacacaaatacagagaatattatagasaaatataagaaataccttgaaatggtgtttaaatattaagaaagtataaaattgattgtccatggaaaacgatttttctgtctttgagcttttagtgctt

SEQ ID NO: 1944 - DNA, 201 bp, Homo sapiens
aaaatggaagtcatcagacagtacttccttatttttccatccccaaatctaccagtcttcttatatttgtacaagaaagaatgtccaataaatttcactcsttatatctgtggataatttcttcctgtcaaactgatttctctcaaagtattccccatcccatttggctcactgttcaagcaaaaagttcaactggccttg

SEQ ID NO: 1945 - DNA, 201 bp, Homo sapiens
gaaaaaagaaatatacatgccaggcactattcaatgtaccaggcatagacttatgaacagaacaggcaagacaacaaaattccctagagcttcatggtgaragacagtcaataaatgtaacaagtaaaatatactgtgctagatgatgatgggtgctttggagaaaatagaagcataaaaaggagacaggaagtgggagga

SEQ ID NO: 1946 - DNA, 201 bp, Homo sapiens
ctatgaactggatgtctgtcttcccccaaaattcatatactgaaaccctaatcaccagtgtgatggtattaggaggtgtgaaggttatgaggatggagccytcacaatgagattagtgttcttataagagacaggagaaagataatcttttttcaccatgtgaggatataatgagaagacagccatctgcaaatacagaga

SEQ ID NO: 1947 - DNA, 201 bp, Homo sapiens
ccgtaaaagggataaacaatacagtacaaggctgaagattccaagtgccacaagagagttgggatcaaaatgctatgggaattcagagcagaaaagattartctcatcatgggaatatggtactcctggactgacccagatagattttacaaatgtaaaagtcagtggggaagggccttctagacagaggaacactttaag

SEQ ID NO: 1948 - DNA, 201 bp, Homo sapiens
aaatatgtatacagcatttacactgtattaggtatcataagtaatctacagatggtttaaagtatgcaggagaatgtgcataggttatatgcaaattactrtgccattttatataaggcacttgagcacctgtggattttggcatccccagggggaatctatcccccatggacatagagggactgtattttttgtgtccaa

SEQ ID NO: 1949 - DNA, 201 bp, Homo sapiens
attgacttccccaagcacttttgtcaaaaatcaattgaccatatctatattacttttccacaaattgcaccctgtattttacaccattaacctatgtatcyatcctttcaccaataccacactgccttcatgagtatagctttattataagccttaaaattgaatactgtgagtcctctacctttgttctttttccaaatt

SEQ ID NO: 1950 - DNA, 201 bp, Homo sapiens
tcctcaaggccaactgcatgcctcatgatgttaccacctccatcttccaatcagcaacggcacattgagttcttctcaagctttgaatctttctgacttcygctgcatgttttctcattccagctaaagaaaattatttgcttttaagggctcacataattagactgggcccatctagataattcaagatactctcaatat

SEQ ID NO: 1951 - DNA, 201 bp, Homo sapiens
aaatgacgatagcaccataaacagaagaaaggaaacagcagaatatactttttcatattctttccaaatatacatgaaatatcatgaagatcacaaaaatytggattacaaagtgtcaataaattttaaaaaattaaaatacagagtatgttctctgacaaaaacagaattagagtaacagaatgttatccagaaaatctc

SEQ ID NO: 1952 - DNA, 201 bp, Homo sapiens
agctatgtgtcatttttttaataaccaagtaaagcagaaactgctggaacaaatctgtttttaagaaatgttatgaatacataatagttatacattggaaygaatcttgaaagaggctagttttgtgtaccaataatgacatgactcattttctcatcttcttcctgctcttccttttcccctgggcatacacagtctttt

SEQ ID NO: 1953 - DNA, 201 bp, Homo sapiens
gtgacccacccgcctgggcctcccaaagtgctgggattacaggcgtgagacatcgcacctggcctataatgtgattctcttttttctctcttttcttcaayatttattaattagaattctactacaaggaagttatcttttctatttatttatttaacccatctatttatatcagcttgaactcatgaatattttatttca

SEQ ID NO: 1954 - DNA, 201 bp, Homo sapiens
catttttgactaagatacagtggtactttaccatacactatactcatggtatggtattcaataaaaagagaatctgttttagatcctccagccaaagcagytttaattaagaaccaaaggatttatagtagtagttgccagggactgggagaggtagaggttggtgggggccggggtggatataaggagatataagtttca

SEQ ID NO: 1955 - DNA, 201 bp, Homo sapiens
accagacgccaacgcccaaggcagaagcaggtcacagcacacccggcccagccacaggctgagcatggatcctgcagcaagtgtgggatccagccagagtrtaagccaagcgcagcctgccaggccaagtgggcagggtacctcctggcgagcctggagcccagtgcagcccgggacaggggcattgcgcccgccatggag

SEQ ID NO: 1956 - DNA, 201 bp, Homo sapiens
cgtgtcataatgtaaataacagcacaagagtagattgtttataaacaaatgtgaaaatgttaatttaacatactcaaatatttcttgataggtacattaayaacaaagcctggattactgttctaaagtatctaacagagtatcttcacatggcaggtattgaatacatccttcttgaaagtgaattttcgtaatatttct

SEQ ID NO: 1957 - DNA, 201 bp, Homo sapiens
tcctgaggcttctccagccctgcagaactgtgagtcaattaaacctctttcctttacaaattacccagtcttgattatgtttttattagcagtgtcagaasgaactaattcagtaaattggtaaagatacccaaaaatgtggaagtgactttgtaactgggtaacaggcagaggctagaacagtttggagggctcagaaga

SEQ ID NO: 1958 - DNA, 201 bp, Homo sapiens
accttcctctgggtgctgttctcatgatagtgagttctcatgagatctccccacctcgcttccttctactctagccatgtgaagtgccttgcctccccttkgccttctgccatgactggaagcttcctgagcctccccagaagcagaaactgctatgcttcctatacaacctacagaactgtgagccagctaaacctcttt

SEQ ID NO: 1959 - DNA, 201 bp, Homo sapiens
gataatctttgggaagtttagagtttgcctagtaataagacatttgttttgttattacctttgtatccctggtctgtttccctgagatcaatcacagtaaytggtttaaaagttaaatcccaaagacgaatacaaccatctctgccaccagtagcaaagccttcttcacaagcattcatgctaaaaattcctgcctagaag

SEQ ID NO: 1960 - DNA, 201 bp, Homo sapiens
aacataggatcaatttagtgtatgtgtgtgtatatttatacacagttttatttagaataaagctaaagataccattcaataatatatgataataggatacygaatagtgagtaaatctatcaaaacttttctgtttatctttgggaaacacaataaaatacctctgtaacaactttagctccacaattaccatataatcaa

SEQ ID NO: 1961 - DNA, 201 bp, Homo sapiens
aatgtaatagtaatacgtaattttaaatccacacaagcaacattatttttcaccttaaccataatacatatgtaacaaattagtggtaaaccaaactaaasagaccctaggctcaaaccattcaatttttaaattgagatttgaataatgggtgtctgcatatgtcaaacccatcaaacttcacaccttaaatatgtgcat

SEQ ID NO: 1962 - DNA, 201 bp, Homo sapiens
cacctgcctcagcctcccaaagtgataagattacaggtgtgagccactgtgcctggcctacatgtcatgtttcaacatgcatatgactatgttggtgacawatcaaatcataagtatctggttactgttgggagatttgaaaatcactcagaagagacctcttctcaaattttgaggtcttgtataaaacagtttaaattt

SEQ ID NO: 1963 - DNA, 201 bp, Homo sapiens
atagggtaatacgcataaccatcacctcagacatttatcatttctttgtgatggaaactttcaaaatcctctcttgtaaatacctgaaaatacataaataygtgattcttaactatagtcatcctacagtactacagaatactaaaacatactattcctatctggctgtgtaaacttgtatcctttaaccagtccttccct

SEQ ID NO: 1964 - DNA, 201 bp, Homo sapiens
gatcctgccactgcactccagcctgggtgacagggcgagactccgtctcaaaacaacaacaacaacaacaacaacaacaacaaaacaaattaaaggagcayagtaataggatcaaaaccaattaaaaggttactgcagatgatggtttctcagacttcagaaaaaagtgagcttctttaaaatacaatgtagtattatact

SEQ ID NO: 1965 - DNA, 201 bp, Homo sapiens; identical to SEQ ID NO: 1717

SEQ ID NO: 1966 - DNA, 201 bp, Homo sapiens
ggggctgcggcaggatgtatgctgaagagtgggcggcatcgggtgggggaagttgtgcaggtgctggagaaaagccggaggcttgccgagaggagcactgrgaggcgactgctgggtgagaccttcgggcagggaaggcatgggatctggggagacacagagcctgatgatactcagagggctgggtttggggaaccctgg

SEQ ID NO: 1967 - DNA, 201 bp, Homo sapiens; identical to SEQ ID NO: 1718

SEQ ID NO: 1968 - DNA, 201 bp, Homo sapiens; identical to SEQ ID NO: 1720

SEQ ID NO: 1969 - DNA, 201 bp, Homo sapiens; identical to SEQ ID NO: 1721

SEQ ID NO: 1970 - DNA, 201 bp, Homo sapiens; identical to SEQ ID NO: 1722

SEQ ID NO: 1971 - DNA, 201 bp, Homo sapiens
acgtcttgagattagatagcaggagtacctagatgatgagtgaggggggtgtctgtggaggcacagtgtgaaggaagttatggaggagaggccctgcataygcggttccttcatctatttatttgcagctttttttgagacagagtttctctgtcacccaggctggagtgcaatggcgcgatctcagctcactgcaacctc

SEQ ID NO: 1972 - DNA, 201 bp, Homo sapiens
tagccttagctcttaactatttaatataagaagtttgttgaataactattaaatgtccaaagctacagtataatgttatttctttatttaccaagactgcytcttttaaatttaccaaacattccattcttattcatatgttgtttctccactgaaaagcacatcttgtttatggtaagtgctcaataaatatttgttaaa

SEQ ID NO: 1973 - DNA, 201 bp, Homo sapiens
tttctccactgaaaagcacatcttgtttatggtaagtgctcaataaatatttgttaaatgaatgaatgaacagtgacacaaatttatggactatatttaaytgcttaccttgaaactattctggtccttacaggtgtttctgggataaaaggaatgcttatagaagaattcttcttttgcttgtaaagtattctttcagta

SEQ ID NO: 1974 - DNA, 201 bp, Homo sapiens
cgataatgggttttgtccttttgtttgttttagaaattggagttctgaatattgataaatctaaaataaattagaaaacaaaactaagagcattaaaatayaaattccctaaataggtcagtgatttgaaagttaaagtttgggttcttcacaatcatattcatttagcaaacacttaataaccactgtactccacgcact

SEQ ID NO: 1975 - DNA, 201 bp, Homo sapiens
ctttgtgtttttcccttaaaagttgtcttgctttcattcctttatatgcagcctgaataaccacagcagaatgccattgtctgatataattttctctttgyaattttgcagctctatatgttcgataatgttgctgaattagaattgaagcatgtttccaagtctgaaatgtaatatatgttctgtacatcctgaaagtag

SEQ ID NO: 1976 - DNA, 201 bp, Homo sapiens
acatgaattttaacatgaagactgcctgcaattaattttagctacaatacaagcaatttaaaatctgacaaaaatgtaccagggtcagctaaagagtttgktaagttttactgtagcagagatattttataaagaccattaaatctgtgctccccatacgtcaacatttaactagctgttttgaggcatagcaacttccta

SEQ ID NO: 1977 - DNA, 201 bp, Homo sapiens
gtgagttgtataaaataattaaagacaaaataataacatgtcaacaatctcttccagaaaacataaaagaacgctgaaacttcccaactcattacacagaygcaaaactcttcaataaaatactagcaagtggaattaatgaaatatcaatgcatataaaaaatacataactaatatttgaattttatccttggaatgtaa

SEQ ID NO: 1978 - DNA, 201 bp, Homo sapiens
tagaatgaaaaattataaaacttttagagtactttgatatgacgctaaaagcataatccataaaagaagaaaagtgataactggattccaataaaatgaamtacttctgctgaacaaaaagccctgttacaagaataaaaagacaagctgcagattgggagaaattgtgtgaaatcactaacaaagaaggaggattaccta

SEQ ID NO: 1979 - DNA, 201 bp, Homo sapiens
tagcaaaaaactaaagaatacagacgcacaaaagatacttttaataaaaatgtctttaaacagccaattactaatagtatctttctaattcagtcagtttmaacattctaggtattacagagccaagaactatgtaaagaatgcaaatcctgatgacatttttatgagtactatttaatcagattggtataggttcaactc

SEQ ID NO: 1980 - DNA, 201 bp, Homo sapiens
aagagcacggtgatcataaatagctatgacagaagctgtctgtagcttgaaaaaacatagcataccactagcacaccttagattcctcaattacgtaacawcctgtgagaattaccaaaatgagacagagccacaaagtgagcacatgatgctggaaatatggcaccaacagacttgctcaacacagggttgacagaaacc

SEQ ID NO: 1981 - DNA, 201 bp, Homo sapiens
tgtgagaattaccaaaatgagacagagccacaaagtgagcacatgatgctggaaatatggcaccaacagacttgctcaacacagggttgacagaaaccttyaatttataaaaaatgcaatatctgcaaagcaccataaagcgaagtacaataaaacaaggtatgcctgtacagttatatatttttaaaaactagcaaatag

SEQ ID NO: 1982 - DNA, 201 bp, Homo sapiens
ttgtagctattgaatattaaataagcaatattacttcaagcctgttatcaaaataagttttatttattattaaacaatttcttagagtaaatcacagaatrgttaaaacattacctttttctttttctgctcttctgcatttcctagtaatatagcttggtgtttcagaacatcatttacaagaaatgtcataatctctct

SEQ ID NO: 1983 - DNA, 201 bp, Homo sapiens
ttagaaaatgtatttggctttgtgtaatgttcaaagttgaagaacagttgggggtaagactaagtttactattctctcctctttggccattaacatttacrgaattaaaggaagtttcagttacagctttctcattaaaagaaacttttgaaacgttggcactgtgtacatttaatagttccctattttctgatgcatgaa

SEQ ID NO: 1984 - DNA, 201 bp, Homo sapiens
tggtgtttagtttcctcataatcctatagctttccaacatacttcttaaactaaggtattgaacagtggggacaatatgcccaaagtgggcaggccacacrggactgattgcattgactgatgagagagaatagagaacaaaaagtatatttcagtactttcggtaaagaaaatgtacatatataaatttatgtaaataaa

SEQ ID NO: 1985 - DNA, 201 bp, Homo sapiens
catctaagcttctgtttcgttagtgaagtggaaataataatacatacttcactgggttttaagaaatttaaattagaaaatgtattcacagcagcctcgtyttggcatttgtaaatttgcaaaaatgagtttactatagttgtcattacgtgcaacaccaaattatgtttaaagagactgtacagtaaaatgttgtattac

SEQ ID NO: 1986 - DNA, 201 bp, Homo sapiens
atgcaggaggaaaggagaaattagccgtagcttcaaatcagacatggcaaaaaattggaaaagtaaccaaaagggactaaccatgatcaaatgctttaagwgacatatccagagaactgtcatcagattcagatgatgaatttaataccactgaaccagtttgcgtacattccacagtttgagtagtacgctgacatatag

SEQ ID NO: 1987 - DNA, 201 bp, Homo sapiens
ttccaggactcaaagcaaagataaaaaagaacctggttggttatgtggatctacaaagtagaatggttcagtaggccagcatgtcccacagcgtagaagaygcaacaaagaagagagcaacaggtacagaattagaatgtttgctttttcagagcaaatgcatttcaattatgtttcagccttctgctgaacaccataacg

SEQ ID NO: 1988 - DNA, 201 bp, Homo sapiens
tgagcatatcctgttggaaaaagtgttgcagacttgcttaacacagggttgccacaaaccttcagttcgtaaaacactcaatagctgcaaagcacaataawgcaaagagcaataaaacgaggtatgcctatatgccttaagaacaattgtactcctagtacaattgaagagactgaatacatttcacaccaaaagacatgt

SEQ ID NO: 1989 - DNA, 201 bp, Homo sapiens
ttcaaagaaaaaaagaatgagtaagaaaacaaattttgccagtagttaagtcacccagcaaaatggcccaaagcactaataagaaaaccaagtcttaactraatgattttattcacttcctacgtctctgtccttactctaatccttatgaacctgaattaatcaagtatataatatttttagattatattaattaaaggc

SEQ ID NO: 1990 - DNA, 201 bp, Homo sapiens
ttgcaagtgttccccaaagttcgtatgttggaaacgtaatctccaatgtaaaggtgttgggaggtgggacatttaagatataattaggtcgtgagatctckatcctcatggaaggattaatgctattttcaaggggggtaggttagttattgtgggtgttagttcctaataaaaggaagcatttggcccccatgatggtta

SEQ ID NO: 1991 - DNA, 201 bp, Homo sapiens
aaattatcacaaatctccaaaaagttttccaacatatatattgaaaaaaaaatctgcataggagtgcacttacatggtttaaacccatgttattaaagagwcaactgtactgcttttgaaaattctttcatcagtgaacacttgtttccatatcttgactactgtaaataatcctgcaatgaacattggagtacagacacc

SEQ ID NO: 1992 - DNA, 201 bp, Homo sapiens
ttttcattttccacttggaaaactccccaaggctagtgacggcctctgaccatccttttaccaactttcacttcatccatactccctaccacagcaaaggrtaacagcccatgtttttggccgggcgcggtggctcacgcctgaaatcccagcaccctgggaggcgaggggagggatcacgaggtcaggagattgcccgac

SEQ ID NO: 1993 - DNA, 201 bp, Homo sapiens
tagtttattacatgcataaaactataaatgataaaaatgaagaatgtaatgaacagtttatgtttttttaaaacaaagtcagattttaaaagttgtacacrgagagcaaaaatcactttacgtactcatgattggctttaatatttctttacactatacatactgaaaatgtttacatttactaataaggaatgccaagcg

SEQ ID NO: 1994 - DNA, 201 bp, Homo sapiens
cccagggattctaactcccatgggcagactttgagactctattcagatttcagccataagaattagacatctgtggccctgaaaccacagatactagtaayagtgactcaaagagtagaaaaaaaatcacatttcaatactgaatcattttcaggtctgtggtgtataactacacaacaagattctattataagcaatagc

SEQ ID NO: 1995 - DNA, 201 bp, Homo sapiens
cttacttaatatttataaatatcttataaaatggttaagatctctgttttataaaaaaggaaaaaaatccaaaattgaaattaagaaggacttgttagcayatagctgttaagtgacagagtcaagatttgaacccaagtctatttgactccaacatccctacaggaagaggaattaaaagaaattaaagactgtgtaagc

SEQ ID NO: 1996 - DNA, 201 bp, Homo sapiens
ctcttgccttgaccccaaaagtgcttccttgataaggatataatatatattttggagagttccctagaaataaaatgagtatctccaacccagataccctraagaggccaatcatggcaaaatgctaaaggccattccttctaagcaaaactggctatccatcatacataccaaagccaattttgagcattccagtttgtt

SEQ ID NO: 1997 - DNA, 201 bp, Homo sapiens
tgcaaccattttcttctttaggaagtctttcttggaaccatctcatacttccttgcaatttacacacaaaccctctgcttctgtgcttccttaatttcctragcatagcataatcacaggactgaacgcaacttgaggacaggaattatccctttcctccctgtgtacacagtgcctagaaaaatgcacatcacatagtag

SEQ ID NO: 1998 - DNA, 201 bp, Homo sapiens
taagataatgataaaggcaggatctaattagttactctattacatgctccttgagaggaagaagagcttgctcgaaaataaaacaaaatacatatgatgcyagtaagtctaggatatattttccacgcctcatttttctaattgtattattagattcatagtgaaatttgcatggtaacaaataatgatactaagataaaa

SEQ ID NO: 1999 - DNA, 201 bp, Homo sapiens
atgaatatataaagctctctggtaaaggtaaatatataaacaagcataaaaacagtattattgtaattttggtttgtaactccgctttttattttctacakgatttaaaaggcaaatgcataaaatgtaattataaatatgttaggtggtgtacaatgaataaagatataatctgtgacatcaataacctaaaaagagtag

SEQ ID NO: 2000 - DNA, 201 bp, Homo sapiens
ccaataaaaaccctagaagaaaacctaggaaatactactccggatatcagccttgggaaagaatttataacaaagtccccaaaagcaattgcaacaaaaamcataattgacaaatgggacctaattaaactaaagagattctgcacagcaaaataaactatcaacagaataaacagacaacctacagaatgggagaaaata

SEQ ID NO: 2001 - DNA, 201 bp, Homo sapiens
aatgaaattatggtagtatagtgcttatgagttattctaccggctaatgcgttagctttttaaaatggtaactatgtttttatagtgttagatatcatgtrgatgaattgcaaactaaagttttgaactaaaactatacaagtttcaattacctgaattttaatgattccactagtgaatttttcctgctttttacggagg

SEQ ID NO: 2002 - DNA, 201 bp, Homo sapiens
ctaacaaaaagctgatgatgaacaactcaaagatctaaataaatggagatatgtatcacctttatgaatcagaataatcaacatagtaaagttgtcagtgyacctcaaaatatctgtaaatgtgatgcaatttcaatcaaaatttgacagtattttttgaggacatagaaaaactaacctaaaacttaaatggaaagacaa

SEQ ID NO: 2003 - DNA, 201 bp, Homo sapiens
cttcttgattataaacctcctctagagcatttgaaaataaagagcttagcaatgaaattatggtagtatagtgcttatgagttattctaccggctaatgcrttagctttttaaaatggtaactatgtttttatagtgttagatatcatgtagatgaattgcaaactaaagttttgaactaaaactatacaagtttcaatta

SEQ ID NO: 2004 - DNA, 201 bp, Homo sapiens
actgccctattagagaagggtataaatattaaactcaaaaaatgttacagaattccaagcagaactcttggaaatggtgatattaaatcagaaaaagtatrtgaattaacttctctactattaaatagtacagtgcaactccagcataagaccctgcagaaggagctttctacagttgctgttgggcttcagactttcact

SEQ ID NO: 2005 - DNA, 201 bp, Homo sapiens
tagaacagatagtctctaaatcattttgtttgagtggtttcaaaagatttaattgtacatttctaatttttagatgtgtagagtacttctacttcaaacayaaggaccctgcattatgaagactttatttaaaaagaaatgtaaagatgatcagctaaattccttcttccttacaaattcctctaaggtccacatcatcat

SEQ ID NO: 2006 - DNA, 201 bp, Homo sapiens
gtgaatggtcataaacacctggtgggttttaaatctttacaagtactttaaaaaactcttggatagttgaaatatatacaggcatatctcgaagatattgyaggttcagttccagaccaccacaataaagcaaatattacaataaagtgagtcacacaatttttttggtttcccaatacataccgaagttatctttacact

SEQ ID NO: 2007 - DNA, 201 bp, Homo sapiens
atattacaataaagtgagtcacacaatttttttggtttcccaatacataccgaagttatctttacactatactgcagtctattaagtgtgcaaaaccattrtgtctaaaacactacaaggtacatacctaaatttaaaaatactaaattgctaaaaaatgctaagaaccatgtgagccttcagcaaattgtaatctttttg

SEQ ID NO: 2008 - DNA, 201 bp, Homo sapiens
gtacttcctttcatttgaaaggaaaaatagatatcatcaaaatatctaagtagagatatttcgtaaacagaactggagaaaaattttaaaaaatctgagcrctagagattaaattttagggatcaacataatactaagagataaaatgtgagaatggacaggttttctactctgttcttgataatgtggaaaaagtacaat

SEQ ID NO: 2009 - DNA, 201 bp, Homo sapiens
acctataataagctactgagctgggattcaaactcaagcagtttggcctcagatctgtgttcttaaccactacctctcaaaataaaaatattgggtaaagygctttaagttgtcactgaaaggttgagtaggaaagagaaatctttcaacctttggttgcatacaatatagtttggaatagtccaaggccaaaagacaaat

SEQ ID NO: 2010 - DNA, 201 bp, Homo sapiens
acctaaaaccacctgatctttgacatagttgacaataacaaacaatggggaaaggatatgctattcaataaacggtcagtgcagaagattaaaattggacsctttcctttcaccacatacaaaaaattaatgcaagatggattaaagacttaaatgtaagacccaaaccaataaaaaccctagaagaaaacctaggaaata

SEQ ID NO: 2011 - DNA, 201 bp, Homo sapiens
acctcctctagagcatttgaaaataaagagcttagcaatgaaattatggtagtatagtgcttatgagttattctaccggctaatgcgttagctttttaaartggtaactatgtttttatagtgttagatatcatgtagatgaattgcaaactaaagttttgaactaaaactatacaagtttcaattacctgaattttaatg

SEQ ID NO: 2012 - DNA, 201 bp, Homo sapiens
aatgagtgagatgatatttcgaagaataaagatgccctggctttggcttgatctctggtaccttatgtttaaagaaggatgggaacacaaaaagagccttmagatcctacatacttttaccaacagtgtaagtccctgacttttacaattgtggtaaaatagacataacataaaatttccctttataaccattttaactgt

SEQ ID NO: 2013 - DNA, 201 bp, Homo sapiens
cttagaaaaataaatgaaagaaactagcatattttataagaaaatgtgttaactagggtgcatccaagtccaaacagaagcatgtgattatcattcaaatyatacaggtcatcgctgaacgggccaatgaaatgaacgccaatgaagactgtagaggtgatggcaggggctctgccccctccaaaaataaacgcagggcct

SEQ ID NO: 2014 - DNA, 201 bp, Homo sapiens; identical to SEQ ID NO: 332

SEQ ID NO: 2015 - DNA, 201 bp, Homo sapiens
agaagaattctgaaatatacaaggacaaagcaggatgtacgtctttagtgtctgccgctgcaaaataaacacgagataactaacgtgcgtgaattgaatgkttgcttctcacccatattttatagaaacagctatggggaagaatattggtgctcaaagtaatgatgattccgagtatgtccgtgcagtttataggtaaat

SEQ ID NO: 2016 - DNA, 201 bp, Homo sapiens; identical to SEQ ID NO: 868

SEQ ID NO: 2017 - DNA, 201 bp, Homo sapiens
ctctttgtgccttagatatcatctgtggtgagtctcatcgatctgtttctaaatttatggcataaagagaaaatggcccaaacaggaaatcacactccacygggaaggcaaatggggggacgggaaagggtgacgggctcttcagcgcggttctacgaccgcactggccttctgaggagcagcagccacgcccagggctgt

SEQ ID NO: 2018 - DNA, 201 bp, Homo sapiens
cctctaacagtaacatattacagaattagtatattcatcaaaatgagaaaacaaacctttgtccaatactggtcacaactttctcatcttgattgaatttmaaatttgatgtttttccccagaattttttcagcagatcattgagtacacagaggaataccgccacatgccgctgctgaagctctgggtcgggccagtgcc

SEQ ID NO: 2019 - DNA, 201 bp, Homo sapiens
gaaagaaactagcatattttataagaaaatgtgttaactagggtgcatccaagtccaaacagaagcatgtgattatcattcaaatcatacaggtcatcgckgaacgggccaatgaaatgaacgccaatgaagactgtagaggtgatggcaggggctctgccccctccaaaaataaacgcagggcctttcttgacttgcttt

SEQ ID NO: 2020 - DNA, 201 bp, Homo sapiens
ttctttgttgggtatttgatgggtatttagcatgccatgccttgatccacctgttctttttagatgtctgcacccccagcccccactgctctttcaggtcrtcttatctacttgctttcatcagggaagtctgaccgtcccgctacagtagaagacctgaagaaacttcggtatctggaatgtgttattaaggagaccctt

SEQ ID NO: 2021 - DNA, 201 bp, Homo sapiens; identical to SEQ ID NO: 878

SEQ ID NO: 2022 - DNA, 201 bp, Homo sapiens
taccctaagtctactgatttaaacgttaaccacttcttaaaaataccttgacagcaatatccagattggtgtttgaccacataacctggccccataaccarataggcacataaaatccattatagtaggtaagacttcgtcaaagaggtctagaaaacatttctgggagaaattaacgaagacccaaataaatgaagcgat

SEQ ID NO: 2023 - DNA, 201 bp, Homo sapiens
cacaacataggaaaactggaaacaactgaaacatccattggcagtaaaatgaataataaattataatatattccaacaatggaataataaacagctgtgaraaataagggaaaatattacacatggcaatatagtcaatatagattgtcataaatcaggtgattgtacacatacatatgatctgttttattgctgttttcc

SEQ ID NO: 2024 - DNA, 201 bp, Homo sapiens
tggacattctaaggtgtgacactgtgtactctgctgtcaggaggctttccggggagaagggtcttgccaaggatttcttgcactcccagccacctgactgrtttagtctgaaatttcagtattccagggtagtatgagaaaggccctatctggtaacaaagaaagcataagaaagatggctaagggaacaaagggacaagg

SEQ ID NO: 2025 - DNA, 201 bp, Homo sapiens
cgtgctctccggggctccggcttcctcggtctggtgcctggtgcgtattttggaaaatacctggctcataaccacctcattgagctcccagtgtcccagtrggccagcggacacacacgggtagctgacttccctaacgtgtccccaaagcctccctggattacagcgcccgctgctccatgtgaccccgcgggagccagg

SEQ ID NO: 2026 - DNA, 201 bp, Homo sapiens
aaaaatatagattttcccctatcccctacccctggaaagtaatatactgaagtctcatcatactgttttggggattccagtaattaaaatctctagtgaayaaagacctgtttcaaaacaacctgtgagctgactggactatttaaagtaattctccttgtagtcactttcagagtgaagacaatgacgaatactgtcttt

SEQ ID NO: 2027 - DNA, 201 bp, Homo sapiens
ccctttataatgcagaaaatgtggaggtgggtacatgtgaatatgatcagtattgtactgtgtatctgacagtgtgagaatctcaccagaatcaatataaygtgtccttatatttcagccatttcagcacaaaaaacattccactaagtattttagactatataggtgcaatttaatgctttccaggtatagcccgaatcc

SEQ ID NO: 2028 - DNA, 201 bp, Homo sapiens
aatgattgcattcactctaccacttaaactttttctcattagcgcaatccaatctctagggtactatctagtagactatgattctattcttgtgttggaargactgcaaaaatagcacttgaaaattaggaatttgcgtgacattaaatttgtttttaaaagtttcaccagataatccccaaaatattaatgaggctttac

SEQ ID NO: 2029 - DNA, 201 bp, Homo sapiens
taagtgtgtgggctctaagatcaaatcccagctaacatgctgggaccatgacctcaagcacctcacctagccgttctgggcctgaatattcttattttaakagcacaagcctcatggaatagttatgatgattagatttgtaaaggtgctctgagaatcgtgattggcccataagtatgcggcacataccgggtgttatta

SEQ ID NO: 2030 - DNA, 201 bp, Homo sapiens
gcagggaaagaaaactaaaggaataaagctggagagagaaggcattctagaaagagaggaagcagatgagcaacggcacagaagtggaaaggtttctggcrtggagggcaatagtggagagtgagagaccgcgagaactcatctctcattcactgggagatgaggatggaaaagcagttttgtgtgcagattgtgctggga

SEQ ID NO: 2031 - DNA, 201 bp, Homo sapiens; identical to SEQ ID NO: 894

SEQ ID NO: 2032 - DNA, 201 bp, Homo sapiens; identical to SEQ ID NO: 898

SEQ ID NO: 2033 - DNA, 201 bp, Homo sapiens; identical to SEQ ID NO: 901

SEQ ID NO: 2034 - DNA, 201 bp, Homo sapiens
taatgagtaggacatgtgtatatggtccgtacctgaaaggaagttattctagtaggagaggtgatctatcaacacataattacaacatgtgatatgagctrtgaacacttatgaacaaacagggtgctgtgtaaaagaataaaggaacaaagatctatgtataggagttttctggaaaatgtttggattcggcagtcattt

SEQ ID NO: 2035 - DNA, 201 bp, Homo sapiens
agaggtgatctatcaacacataattacaacatgtgatatgagctgtgaacacttatgaacaaacagggtgctgtgtaaaagaataaaggaacaaagatctrtgtataggagttttctggaaaatgtttggattcggcagtcattttcaaaggcagagggcattgatagcagtatcttaacatggaaaacattaaaactaac

SEQ ID NO: 2036 - DNA, 201 bp, Homo sapiens
gaaaatatacatcaaattataatttcagtgtattaaaaaactgcctgtttaaatatgtcctttctttgctgtaaattttggttaaaatctattggagttaygtccttgtggtgaagtacaccctacccccaagagagcaaatgatgaataaatcagtagatgttccatgaatgcaatgttggctgagctggccacagtgga

SEQ ID NO: 2037 - DNA, 201 bp, Homo sapiens; identical to SEQ ID NO: 905

SEQ ID NO: 2038 - DNA, 201 bp, Homo sapiens
ctcaagttgctcagggtctcatatcaatgataaacttagtccaaatttaaaagacaatgcaaatttgatatttatgggataaatattacaaacccatgctrttgaaattagtcctccaaaaagctgtagtctttttacttgttgaaaggtctggggaaatcatcttgtagtatggtgagaaaaggatttgggtcaggaaac

SEQ ID NO: 2039 - DNA, 201 bp, Homo sapiens; identical to SEQ ID NO: 911

SEQ ID NO: 2040 - DNA, 201 bp, Homo sapiens
aatgtgactcctctttctcggacttcccagcctccagaaccgtaccagtctgtgatatttggttataggagcacaaagtgaactatgacaacatcattaasagggtgataaggcaaactacagagaggaagaaacttggcaatacatagctggcaaaggatttgtattcatatataatttattatgtaataattgctcatt

SEQ ID NO: 2041 - DNA, 201 bp, Homo sapiens; identical to SEQ ID NO: 913

SEQ ID NO: 2042 - DNA, 201 bp, Homo sapiens; identical to SEQ ID NO: 334

SEQ ID NO: 2043 - DNA, 201 bp, Homo sapiens
ccacctgacagatgggggaaggcagagaagtacagccctgacaagcaggctcgtgaaaatcagactttgttctgttcacaaaggcgcagctcacctcgtgsccatggaacgccgcctttattaacacagcacaggcacgtcccaccagcgtgcaacaccgtgcggcgtggaactgccatctctaggcatgaacctccgctt

SEQ ID NO: 2044 - DNA, 201 bp, Homo sapiens
ttcttttctcctctacaacatgtaattaagtctataattagactgttgtataatgattgcattcactctaccacttaaactttttctcattagcgcaatcmaatctctagggtactatctagtagactatgattctattcttgtgttggaaagactgcaaaaatagcacttgaaaattaggaatttgcgtgacattaaatt

SEQ ID NO: 2045 - DNA, 201 bp, Homo sapiens
ctcccagtgtcccagtgggccagcggacacacacgggtagctgacttccctaacgtgtccccaaagcctccctggattacagcgcccgctgctccatgtgwccccgcgggagccaggacgcgccccgcctcccggggctgcaagttgcgcagggagcgagcgatgcgcagcagagctgggctccgagccggatgcgccttc

SEQ ID NO: 2046 - DNA, 201 bp, Homo sapiens
cttcaggcttccttctaacctcccagacatgcaagtccacttcctcaccacctgctttctgaggttccagcagatgagcacttagctgctgccatgagctrctctacctagaggacagttaagagccctccaacagagaatcagccagttcatgattctaaaaagatctctgatctcaaatttatacatacatatgtgaag

SEQ ID NO: 2047 - DNA, 201 bp, Homo sapiens
tgcatgtcggagtagagagatctcacatcttcaccttgcccatgtactacacacacacacgcatacactcatgtaaacccatgcacacacatgcacacacytacacacacacatatgctcatgcacatacacatgcacagacacatgtatataccaacatacacacattcacatatacacacatacacaaacacatgcaca

SEQ ID NO: 2048 - DNA, 201 bp, Homo sapiens
ctcattaattatttataattcctacaaatcactaaaaatccagacaactacaacgttcaacacggaaaatgatttaataggtgctctctgaaatagccaayaatcttctgaaatgatgctgactatcctaggtcactaggaaaattcatactaaactttcaacgctcagcctaggcaacatggcgaaaccctgtctctact

SEQ ID NO: 2049 - DNA, 201 bp, Homo sapiens; identical to SEQ ID NO: 930

SEQ ID NO: 2050 - DNA, 201 bp, Homo sapiens; identical to SEQ ID NO: 931

SEQ ID NO: 2051 - DNA, 201 bp, Homo sapiens
aaagtgcttagtattttgcctaaaactcagcaagtatgaaatgaggttgttgtcaatttttactgcagaggatatgacttagaaccacacctctaccccckggtgcccgtcatcaacaggtgaggcccacctgacagatgggggaaggcagagaagtacagccctgacaagcaggctcgtgaaaatcagactttgttctgt

SEQ ID NO: 2052 - DNA, 201 bp, Homo sapiens
ggacatcagctgcagttggaacatgcctttcccctaaattcttcacaatctcccggtacaccgtctgctgcacttctgggtgccttgccaggaggtacacmgtccaagacaaggtgaaggacgtctaaggagagaaagtggcagacacaggcaggcagtgagtaacaccagggactgaaacagaggcggtggcaggtagga

SEQ ID NO: 2053 - DNA, 201 bp, Homo sapiens
ctgcctgggtccctccccgggaccagtccctggagaccctgcccgccgcctctctcgggctaccactctccgaaactccatccctgactcccctccccgcyacctcctccccaggggtcccggctggggcccctccaggggacccctccctgccgccacctcccgagacacccatttcccccgcctcttcccagccgttcc

SEQ ID NO: 2054 - DNA, 201 bp, Homo sapiens
agaacaaatctgcatcattaagtgaggcgtgactgcatacacagagttttctcctcctggagccccccagcagtgcagcaggcctagtacaaacatgaacrgtgtgctaaacaaatctgccttaaaagtagacaacggccagtcgcagtggctcatgcctgtaatcccagcactttgggaggccaaggcgggtggatcacc

SEQ ID NO: 2055 - DNA, 201 bp, Homo sapiens
aaagggaaaaggggcagaatcactcaagagcagggcagggcccagagccctagccggacagtctcccggggtgctcccgcctgggggccgcccgggtccaytcacacccaggatggcagccgctccccccttcccactccacactgcaccccaaatgtcactgcagccactgagaagaccgtcgagcccttcagagactcc

SEQ ID NO: 2056 - DNA, 201 bp, Homo sapiens
agggtcgtggcaggactgagcctcaagtgcccacgagcgtcacccacacctccacacctccgcatggcttgcctcccaaccctgctccactttcgcgttcycaaggagaccacctgcactcaaagccttgcctccagatggactttggaggacccaagctaagccagcccggcgcctgggcctaggcactgcccttccctt

SEQ ID NO: 2057 - DNA, 201 bp, Homo sapiens
taatttctttatttttggcaatgcttttatagtaaaaattttagtcacataagaaaacaaatctctttgtaatctcaccttggatttgaacaaaaattgtmacattcaaatgaatgtgcgtggacctgaaactctacattttaagcactgaccaatttatttggagtaaagacatcatcttgcatggacatttacttgtac

SEQ ID NO: 2058 - DNA, 201 bp, Homo sapiens
tgtttttcctcctcttcaggagacccacatagagattttccaaaccccacaaggacatccaggttctccacggacttatcggtgtcggcagccaatgacaygtctgaaggacttttctcatcactgctctctatgtgcagctcatcaaacgtttcattgtcatcagtgtctgaaagctggaggttgagagccatgcggcca

SEQ ID NO: 2059 - DNA, 201 bp, Homo sapiens
ttggcgggtgatgaggatgatgaggaactgctgacctgagatgatggtgactcatttacccctaagaaggaaggcttggggggtgtggaggcgctatcatwcaattgtccttttctccctggagatacacttttggaggacgtcatttccagtggctcatgggttgaaggagagatcctgggagtctgtaatcctatgtcc

SEQ ID NO: 2060 - DNA, 201 bp, Homo sapiens
tatttttatttttctattagtttgttaaatatattctatatttaaacttcaattttgcaggtttctgtttcaggcatattagaggaagcttctggaaacasaatccgagatagaagtgatctcaagactttcaactcaaagctgctcgtcgatttccccagcaaatcttctgagttgactaaagatgagactgtaacatct

SEQ ID NO: 2061 - DNA, 201 bp, Homo sapiens
ttcacatcaatgtgctgtggtgttaaaatacatctcattttgcatctaatctccttcctatataggctgataacatataataaatgagttttccctcctawtcttgtaccagtcacaaaggagtctatagcaacgtcctttgtgaaattagtaattttagcccaatccatgctgatgattatggagatgaaacaaaaagca

SEQ ID NO: 2062 - DNA, 201 bp, Homo sapiens
gaatatctcatgtaatttattgaatactgtgctgaaaatgaacatcagaatggttgtatgggtgctcacagtacagtatctactgaatgtgtattttggcyccatcacaaagttaaaaaatcctgtcgaactaccctaagctgcagattgtctgtatggtatggtatgataattacgggcagactttggagtcaaatttgg

SEQ ID NO: 2063 - DNA, 201 bp, Homo sapiens
aagatggtggtatagtacgtcataaggtttcaaacagtggttttatttagaaaaagagtgtgatacgtagtgcattgcatatatacattgttttcatccaraataacttctatgaaaacaattctttgcaacacagtttaaaataagcagacagtgaatttaccttgagccctagtggggggaaattctcttcaactctga

SEQ ID NO: 2064 - DNA, 201 bp, Homo sapiens
atggcgctacatagctcttttaaaatacattccagacagccacctaggcagccaatgataataacgtgcaatgcaatgggtgtcccgcttaggcacgtacrttagaggttgccagtggatttgctacagggcttgagttgaatgccaagaaattattattttatactgtcaatgtgaaagtcatatggctgaatactgacc

SEQ ID NO: 2065 - DNA, 201 bp, Homo sapiens
ctctactcttgaatgaccccagaaaataatgcagggaaatatttcaagttttccctcagaaaattgtagtatgtcctatattttaataatctctttattasagtacaaaaagatatggatatagtaattccataaagagaatattttgtgtttaagtgctctggaacttgccaaaagcaacaatgaatactattaaattat

SEQ ID NO: 2066 - DNA, 201 bp, Homo sapiens
tgacttcttcgatctgctgcatcttaaaagggcggaaggctataggagctttttggatggaagactttttcttcctgttcttggggctcgaggtggcatgyctcttgacagaattctcactctcctcatctccctgcttcattaagtcatcggctatgattcttggcatcacggaatgaatcatcctctctttgagggctt

SEQ ID NO: 2067 - DNA, 201 bp, Homo sapiens
cataaaataaggcagtgtcaaggatgggcctgccctgggggaagcactccctaagtgccactgtggacgttttcaggggctgtgtggggacgacacactgygaccctacaagcgagcacccttgtggacgctgccccctccaggccgcagggacagtggcagcagctggcgctgggctgggtggggccgacgccagccctc

SEQ ID NO: 2068 - DNA, 201 bp, Homo sapiens
ttttgtgacctccaaaggactcacaggaatgacctccaacacctttgagaagaccaggccctctccctggtagttacagtcaaagacctgtttggaagacrtcatttcaagtgctctccctcccaccccacctcttggggtaaggcctttcctaagctaccccttgggtccctagcctaagaaacaagggggatgtcatcc

SEQ ID NO: 2069 - DNA, 201 bp, Homo sapiens
tggttttcctgattttgctccaataggcactttttttagggggggattatgcttttgatcaaaagcttggtgctgaatctctcttttctccagagagattyagtctcaccctgctttcccaacacatggcgtttgtgtagaggggaggaccaaaggaacatgtgtggtttggaagcagtgttctgttctgttcttcttgta

SEQ ID NO: 2070 - DNA, 201 bp, Homo sapiens
ggaatgcatctgagacatagaggtcatctcggccttctgcaacaatacctggaaggaagaccggagaagtctttgtgagatgggagaaagttggcttcaayccacagatgggaattcagtttggattaagagatcctttggggctttttgaaacataagaagaaatcctaaatcttcacctaatcatactctcacaatgaa

SEQ ID NO: 2071 - DNA, 201 bp, Homo sapiens
aaagaatgaggatgctctatatggatgtactgatatggaagggtccttaggataattatgtggggaaaaagcaagctgcagaaagtgtttatagtatgctrtgctttttgtaacacaaagtgaggatgatggggtgaggggtggctagagacaagggtaggagtagacttatcaatatgtaccatcttatttagttttcta

SEQ ID NO: 2072 - DNA, 201 bp, Homo sapiens
cagcggcaccaagggagatgtggaaggcaggctgaagaagcagagagagagaggagaggaccctgccattcatcttcccatctccactgccttcggttgcycactctgtccttcaactacatttggaaatgcaatttgaggctgagaggaccctgggagggctatgaagcacaaattaaaaccaagacagttgtgccacca

SEQ ID NO: 2073 - DNA, 201 bp, Homo sapiens
aagtaactcccaaatgaggttccagattcatttttctcatcccaggtagtaaacgtgttttaatgggtttgtttcttgcccatggcaacctcaacacagasgggagaactgttttattaccctaaaatagtgagaaccactgttcaaactaactagctaccaagtgacttctaactcatgaagaaaatttgtatttaagag

SEQ ID NO: 2074 - DNA, 201 bp, Homo sapiens
ctggagggagatattgtcatccatccagtttcctctctataccaaatacaaagtacacataaataagcaaaacaaattttcaaagttccttctctagaatsctctttcttttgcatatgtagtttcagtggagatttctcaactagctgaaatggagcacttgaatatattaaaagagcccaaactgcttacagcaatttc

SEQ ID NO: 2075 - DNA, 201 bp, Homo sapiens
taatccctagtggtcatggcaggataacctcaatccagtcctctttgacctgaaaatatctttattgatattccatgcatggctctcaattcaaagtgtayagtgggtcaaggcttaggtagtaaaatggatcatccatttgtcctcagaataattctggagggagatattgtcatccatccagtttcctctctataccaa

SEQ ID NO: 2076 - DNA, 201 bp, Homo sapiens
caccatcaatatttctgtacaggatttacctcttgcacaaagggtatctcttctctaaattcccattgtatctcgtttgtgatattcattgtgaaacacartcatttagcaccttgcattgttgttcactcatttctgtgtattttgctcccaaaccagaatgtttgctgctaaaatgtccagactacatctcagatgtca

SEQ ID NO: 2077 - DNA, 201 bp, Homo sapiens
acaaagtcactcttacttctcaatatttatacccattgatttaataagcatctcatttgccagctttctggtcccactttgtagtttaattaactgtctcytttagctcttaaaaacttgggtgaacaaaaagattatcataagaaatgcaaactgccacacgagtccctgctgtgacttgggtgccatcagtgtagagct

SEQ ID NO: 2078 - DNA, 201 bp, Homo sapiens
gcaaaaggtcacttctagtctggtatccattatcattaggaagagtgaaaaactggtctatggggacccagggcctcctcaacccagacagagaacccacmaactcagaaaggagaccgacagtgcagggactgggttagtgccctaacaacattgtagggttttttaagggtttacaacaccatatttgttatccgaaat

SEQ ID NO: 2079 - DNA, 201 bp, Homo sapiens
acttctttctgccccaggaaccttgggtagagggggcattggacctcaaagccagctggcagcctcagcatttcagatcaaagtggcctgcctcttcaacrtctcagcctacccaaggcatgtcctaggtgtaggctgctctctggtggccagatagggaaggactcattcatcctttggcaaggtgggctgcgatctgag

SEQ ID NO: 2080 - DNA, 201 bp, Homo sapiens
gtgagccaagatcacgtaactgcactccggcctgggtgacagagtgaagaccctgtctcaaaaaaaaaaaaaaaaaaaaatggtttggacacagatcagakaaatttgaatattgactatatattttatgatattaaagaatcattgttagctgggcacggtggctcacacctgtaatcccagcactttgggaggccgagg

SEQ ID NO: 2081 - DNA, 201 bp, Homo sapiens
cccagctgttgggattacaagtgtcagccactatgcccggactatttaaaaaaaatttttttggagagttttctggtaaaaactggaaaacctgctagacrgattctaaaagagctgtaatacttgatttctttgacattttaatttttagtctgaaattttcatttccaaattttcaatttctatgcacaaaattctttt

SEQ ID NO: 2082 - DNA, 201 bp, Homo sapiens
gtggtgggaaggaagctcactgagacttttgcctaggaagaacatttttgtaccgttgtgttttacctaatttgcctccattccagtaatgttgcagcaaygagggaggaagtttttatccttagctggtgtgactggccataaagcagtttttttggatcagtagacagttttgattagtgttgcatcatgcattgacag

SEQ ID NO: 2083 - DNA, 201 bp, Homo sapiens
gcatgagacagggatttgattgtagttatcactgtaaacatcaaactgatttttatgcagaactattgccccagggcataccttccaaggaacctggtctstccttacctagcgaattccacatacacatagatgtacacctacctgtacactcacagattgggtggtgattaaagggacagaatcggggaccagcttctt

SEQ ID NO: 2084 - DNA, 201 bp, Homo sapiens
ttttggtccatattgagaagtgtttgggtaaacatttgatgagccacgcgattctttcgcaaagagtctaccaagatcagggccttgtcttcaattttggyatcataatattttttcttttcctcttccttcaatgtcagaacatcgtgttttgccaaataattaaaaacaccatgaagaacatctttgcccaggtattcc

SEQ ID NO: 2085 - DNA, 201 bp, Homo sapiens; identical to SEQ ID NO: 2052

SEQ ID NO: 2086 - DNA, 201 bp, Homo sapiens
gtgtagcggctggggtaatcagtcgttatgctccccacaggaaatctgaatggcacattctcatggctgccacaggctgacaacatggagcacctatgccyattgttacattagcagggcaggtggaattgctggtctcagctgtcacttgccttaataaactgcataattccatcagggactccagtcttgctgagcttc

SEQ ID NO: 2087 - DNA, 201 bp, Homo sapiens
atttgaaaaagtaaaactatatctagcagatgatacgagtgtacatacaaaaccctagaaaatcaataaaactaacaattcgataaggtagcaagctgtaraattatcttatagaacttgatagccttcatatacacaatgataaccagttagagtatataatggcatggaaaatgccatttatatggcaaaaaagaagat

SEQ ID NO: 2088 - DNA, 201 bp, Homo sapiens
ggattccgtgacactgtcatggaaaacacctgcatattcacccccaaggtatgagaaataatgatgggccataaggatctaggtctttgctttgggattcyctccctccagagtctatttagccccagggcacatggcagctctcacccctatcgtcttcctaactaaagtggtttaagaggagtgacctcctgcaacaga

SEQ ID NO: 2089 - DNA, 201 bp, Homo sapiens
ggatggggagagaatagttcttaaataaggcaaagtaaatataggaactgtctcattgccctgctcaaattggcactaatgtgacagaacacaaacccacmaagaaaacaggagaagaaataacagcagatgagagaagtgggtaacatttcagaagctgaaaagcagacagatgcaggcacagtacctgagctaacagac

SEQ ID NO: 2090 - DNA, 201 bp, Homo sapiens
gatttttaaatgcaatcacatccagggagttattttcacaccagctgcaagtgtgcgaaaccagattctcaattggtagtgtcagcaattcttccatttargccacacttccacacacgagtcagcactgctactgagtaccgccacctcttcacacacttcccagcagggctgggagcatatcagttaggcgcttggggc

SEQ ID NO: 2091 - DNA, 201 bp, Homo sapiens; identical to SEQ ID NO: 2053

SEQ ID NO: 2092 - DNA, 201 bp, Homo sapiens
atttgtggaagtggattcaccctttctgccttccgccctgtgaggacacagaaagaaggccctcatctgatgctggtgccttaatcttggacttcccaacstccagaactgtgagaatacaaatttctgttccttaaaaaatgactcagtctgtggtgtcctgttatagcagcacaaacagactaagatagtaccctttcc

SEQ ID NO: 2093 - DNA, 201 bp, Homo sapiens
actctgcagagtcccaagacagtgcagggtatcatatagcaagggggctaagcatgctaacatactaaatcaggtctctcccatctgataaagccaccagytccactccaatgataacccattaatccattaacccatgattaatccatgtgtgagggcagagccctcatgatccaatgacctcttaaaggccccaccttt

SEQ ID NO: 2094 - DNA, 201 bp, Homo sapiens; identical to SEQ ID NO: 2054

SEQ ID NO: 2095 - DNA, 201 bp, Homo sapiens
cagacatagaactcatggtgccaaagcgccgagatgcctgccgggaagggggaaccagcccatgttagtctccagaagaaaagatactccttttataatayttataatcacagcaaattttataagacttacataaatttaatacatcatttttaataatgtttacagatcgcttactgtctcaggcattgttctaagcat

SEQ ID NO: 2096 - DNA, 201 bp, Homo sapiens
gacaacacactgagaggaagcaaagggcatcagactgccaaactgctgcactggaagctccaatgttagttctaggacctggccaaactactgatcaagtrtaaagtcgagtaaagacatctgtaaacatgtgaagtctccaaagcttctcctcctacatcccttctctcaggaacctactggaacatgtgctccatcaaa

SEQ ID NO: 2097 - DNA, 201 bp, Homo sapiens
tgctaagagctctaatagaaaaaatgaaccatatgcaatgagagatggatactgcaagcatagtgatggaaacaataaggaagaatcaaaaggaaagaaaygctagaaataaagaacactgtcatggaaataatgcatttgatgggcttttaaatagactggacacatggccgggcgcagtggctcatgtctgtaatccca

SEQ ID NO: 2098 - DNA, 201 bp, Homo sapiens
attccttcaagaaaaccagcttgttggcagtaatagagaagaaatgagcttctcccaacaacagccaacaacagccaatgacaacagcaaaataggaaaawgggttgccctctgaaaggtaaataaactctatacacaataaatgaccatctgtggaagtaaaaccgagagacaggctttaccacctcccagaactccaat

SEQ ID NO: 2099 - DNA, 201 bp, Homo sapiens
ccttctgttcctgtctcagtacaaagtaaggatgatgtctatgaggctttcatgaaagagatggaagggctgctgtgacagcttttgatgcccgaacaggmttttgttcacaacagtggcccatggagaaagaggctcttattaaacttagaagaaagaaccgcttccgttgtcagggtgttttctaatttcagttcaagg

SEQ ID NO: 2100 - DNA, 201 bp, Homo sapiens; identical to SEQ ID NO: 2056

SEQ ID NO: 2101 - DNA, 201 bp, Homo sapiens; identical to SEQ ID NO: 2057

SEQ ID NO: 2102 - DNA, 201 bp, Homo sapiens
gggggcagtttcccccatgctattctcatgatagtgaattctcatgagctgataattttataaggggctcttccccctttgctcagcacttctcctttctrcctccttgtgaagaaggcaccttgcttcccctttgccttctgccatgattgtaagtttcctgaagcctccccaatcgtgctgaactgtgagtcaattaaa

SEQ ID NO: 2103 - DNA, 201 bp, Homo sapiens; identical to SEQ ID NO: 1392

SEQ ID NO: 2104 - DNA, 201 bp, Homo sapiens
gcctgtaatcccaactactcaggaggctgaggcaggagaatcacttgaacccgggaggcagaggttgcagtgagctgagattgtgccatgacactccagcyggggcgacaatgcaagactccgagagagagagagaaaaaagaaagaaagaaaaagaaagaaagaaagaaaaaaagaaagaaagaaagaaagaaggaagga

SEQ ID NO: 2105 - DNA, 201 bp, Homo sapiens; identical to SEQ ID NO: 1393

SEQ ID NO: 2106 - DNA, 201 bp, Homo sapiens
taaataattttttttcccatagaaaaatgcactaagcctgacctgagtaatggttacatctctgatgtaaagttattgtataaaattcaagagaacatgcrttatggttgcgcttcagggtacaaaaccactggagggaaggatgaagaagtggttcaatgtctctctgatggatggtcttctcaaccaacctgtaggaaa

SEQ ID NO: 2107 - DNA, 201 bp, Homo sapiens
ttatcatggacgttctaaacatttctcatgaatgaatgttgatatagcacagtgctgatctcaccacctgccacaaagtaaaaactctctaaatgtcaaayactactattataagtaatactattctatcattgagacaactatggttctgtatctctttaaggagtgcagtctaggcaacaacatatttcaacatcaggt

SEQ ID NO: 2108 - DNA, 201 bp, Homo sapiens
catgtattcttaagatttgtaaaaccatattttgagattttttataatctaggttattaaaaaagtttataaaataaataatttttataattttagaaacrtgtttggctcctgaattatataatggaaattattccacaacacagaaaacattcaaagtgaaggacaaagtacaatacgaatgtgctactggctactaca

SEQ ID NO: 2109 - DNA, 201 bp, Homo sapiens
ttatagtcagattgcccaatgtgtaagattagtgtgcgagtggaagctaggcagtgtacatgggtatgttgttcaggaacattatcaatattatcaggccrtaggatgaagaatccagggaggacacttagcattagcaagagtgaacatacaaagaaggaagctacagcaatacagcttttctaaaataaacatttttgg

SEQ ID NO: 2110 - DNA, 201 bp, Homo sapiens
gttgaagggaatagggtaataactgaaattatcatattgcaaggcaaagagaggtaatttactttaagtaacaagaaacttattttgataattaagcatargatgccagaaaaatgcttgaaactctggcctctggaagggcaagattgctactctaatgctttatcatttgtaagactcatctctcttcatgtgccaact

SEQ ID NO: 2111 - DNA, 201 bp, Homo sapiens
gtggctgttaactgaaggcagccctctgccccttgccttgcagccgttctgctttggaagctcatgatgtagcctcttgtttcttcaaaaccagcaaggakagagagtctcttggcaagaatggcgttaaaaactgatgttacataattatgtgtgcataatcacgtactaatccatcacctttgctgtattttgtgggct

SEQ ID NO: 2112 - DNA, 201 bp, Homo sapiens
tcatggaaaggggtatcacacaaggaagttaacatcaggaggtgaggatcaaaggaatgctcctagaatcagtctgccattctctctatgatgcttgacaygatgaatattttaatttaatctttattattttttgtaattatatgactaaaggtgctgattaattttttccataaggaagaagaaacagatgtcctcctc

SEQ ID NO: 2113 - DNA, 201 bp, Homo sapiens
ccaggactcttggcatttttacattttacactttcaagtctttttttatatcaaataatttttggaattatgcagactacaaaatctgaaataagagagtyctacaagcatcaaaaaatgagtgtcagtattatcaaggtctgttagagacatgaaacagcaacactgtcactttttcatttgaagtgagagttatacttc

SEQ ID NO: 2114 - DNA, 201 bp, Homo sapiens
ctcagtgatttctctttgcccacactttttgcccttcagatcagtctctccatattacagtcagtgatgtcttttaaaaattcccagtaagcatcgcattytatttagtgacttccaaaatctttaatttgacctacaaaggccttcacaatcagggctccaacctctccaagtttcgcatactcctctctgtccttcact

SEQ ID NO: 2115 - DNA, 201 bp, Homo sapiens
ttagaattatttattctcatttttatattgattgatatatttgaagctaatattttactctgattactgctttagttaatatcctataaattctgatatgygatgttttctttattgttttctagaaattctgtcattttagtttatatttattttttgaccccagagttgcttaatagaaagtttgtacatttccaggga

SEQ ID NO: 2116 - DNA, 201 bp, Homo sapiens
gtttctctgggcagaaccaggtagcatccttctaagctttggaataccctggggcaatcaccatgttagtgattctttgatctttgacttagtgtcctatrctacaaggatggcacatcttctaagcaaagtttgctttcatattcatcagaataaaatttatctcacaaaataaaactatttaaaaagcaaaatggtaat

SEQ ID NO: 2117 - DNA, 201 bp, Homo sapiens
caagggtgtgtgttcaggggtggacaatacccctttcacacttttcacagtttgggcattcacagtatgtgggctattttctgggtcatgcaggagcaatrtactttcttcagagggtctgtggattatcttggctttcctgttatatccttgcagcagttcttggagcaaaagttcacaatgcgagtctccacatcctgc

SEQ ID NO: 2118 - DNA, 201 bp, Homo sapiens
gccaagtattgctttgttttacttggttgtctgttttttcttttaatgctatttatttcaaaattttttatgagttagcatatgttaaggagaaactttayctattcctgaactgtactgtccaatacagtggccatcagccacatatagctattggagacagtacttaaaatgtcactagttcaagatcagatattctgt

SEQ ID NO: 2119 - DNA, 201 bp, Homo sapiens
agccacaggttgaaatgttttgaggaaggggttgtgagccaaggaatacaggtgatttcaagaagctagaaaaggcaaagtagctgattctcctccaaagyctccagcaggaatgtggctctcctgatatctcgattttagtccagtgaaactgactctggacttctggcctctaggactgtaggaggataaatctgtgct

SEQ ID NO: 2120 - DNA, 201 bp, Homo sapiens
aatcattgttatcagggcaagagaaaggggctttgtatatcttggtaactattgaaactggaaaggctatcagtacaaattcacaacagtatgataaagcrtagaattttctctgtaggaattattattccagacattaagagtctctctaacctctccatactctcttccctgctctaatcactccagtctttctggtct

SEQ ID NO: 2121 - DNA, 201 bp, Homo sapiens
aatctcacttctactgtgttcccccaaaaagcaccgaatttgtttccaggcagtaggggagcaggattgagaacttgccccaggctactagcctcccagcygagaatgcaagccagacttttgtgcctccctacctgttaagtctgcacaccagattcacgccctttcctgagttctggacaggaaagtttgtgttcggtt

SEQ ID NO: 2122 - DNA, 201 bp, Homo sapiens
cccagctgatccctctgctcttcaatccatccctgcagtaccctagtgtctcacctcccagctgactcctgtgctcttcaacccattcctgcggtatcctrgtctctcgccgcccagctgactcctctgctcttcaatccatccccgcggtatcctagtgtctcactgcccaggtgactcctctgcttttcaatccatccc

SEQ ID NO: 2123 - DNA, 201 bp, Homo sapiens
cttattttacaaatgagaaaactgaggctcagagttgagacatggatttcccaaggccacacaaccaggaaatggcaagactggttccaatccccagatcrttcactgctccaatagaaatttgccaaataaaaccaaacttcactggcagttggtgctggttgaggcatgggcacccttgggaggagtcctttctctacc

SEQ ID NO: 2124 - DNA, 201 bp, Homo sapiens
agcccttttcttagaggaaagtccgtctcctcaccctaaggtccacgatccggcgcctgcctgcctctctgatctaatttcatccttgcttaccttggtcwcctttttagtcctcaaactcaccaaacccactcctgccctgagttctttgtacttgctcccctgacctacaaagctctgcaccaattctttgtatagtgg

SEQ ID NO: 2125 - DNA, 201 bp, Homo sapiens
gctgctgtaccattttacatttccaccaacaacgtatgaagattccactttttcacatcctgagcaacatttgttatttcctttttaaaaaattattgttktgggcgcacagtggctcacacctgtaatcccaacactttgggaggctgaggcaggaggattgcttgaggccaggagtttgagaccaacctgagccacata

SEQ ID NO: 2126 - DNA, 201 bp, Homo sapiens
ctgttttccatagctgctgtaccattttacatttccaccaacaacgtatgaagattccactttttcacatcctgagcaacatttgttatttcctttttaaraaattattgttgtgggcgcacagtggctcacacctgtaatcccaacactttgggaggctgaggcaggaggattgcttgaggccaggagtttgagaccaac

SEQ ID NO: 2127 - DNA, 201 bp, Homo sapiens; identical to SEQ ID NO: 1763

SEQ ID NO: 2128 - DNA, 201 bp, Homo sapiens; identical to SEQ ID NO: 1764

SEQ ID NO: 2129 - DNA, 201 bp, Homo sapiens; identical to SEQ ID NO: 1765

SEQ ID NO: 2130 - DNA, 201 bp, Homo sapiens; identical to SEQ ID NO: 1766

SEQ ID NO: 2131 - DNA, 201 bp, Homo sapiens; identical to SEQ ID NO: 1780

SEQ ID NO: 2132 - DNA, 201 bp, Homo sapiens
cttttgtttggtattgagctttcttttcctactcaaaaggaggagcagatgggcttatataggtgctatgctagcctcaaaaaaatttaagagccacatgmagtaagccaactcattgtgctgataggaaaggtgaggtgcagggagaggcacccagtgtcacgttgtgagttggggttgagctgaaattgacttaggatt

SEQ ID NO: 2133 - DNA, 201 bp, Homo sapiens
tgtgtgtgtgtgtgtgtgtgtgtgtgtgttttagagcaaagtttgcattgaccttagaaacaatatgtaatgctccagacttttaaaaattcaactgaggygggaggctgaagcaggagaattgcttgaacctgggaggcagaggttacagtgagccaagatcatgacactgcactccagcctgggcgacagagcgagact

SEQ ID NO: 2134 - DNA, 201 bp, Homo sapiens
gaagaggaagtggtagaaactacggcaaactggacagtgcatgcccatcatgggaagcagcttctattccacgccaggtaacttcagccatgtgagaatgygggcccaagttgttatcggatttcccgattgttcaagagatgttggaaatctggatttttatgaaaattctcaactttttaacaaaagcaaacaaaattt

SEQ ID NO: 2135 - DNA, 201 bp, Homo sapiens
caccctggaccagagctggacccctgccagcttcctgcacctgtctacttggtatgtcccttgcccctcccccaggactggattatgtaaggatagaacaygcaaaaccaaaagaggaatttctttggtacggcttggagagctggtcttacaggagccaagataggaactttgtcagcttgttccttttctgtagcttat

SEQ ID NO: 2136 - DNA, 201 bp, Homo sapiens; identical to SEQ ID NO: 1788

SEQ ID NO: 2137 - DNA, 201 bp, Homo sapiens
aggaccctgcatagatttctaggcactggagcgtcctctggaacgccctgtgagacggaaggtggcacgcacctgctccttgaggctgttcaccttctccytctccttctctagtgaggcctgcagggcctggacaagatgcttcatctggcgatcctcctcttctttgcgctgcaaaactgcctgcacctagatcagatt

SEQ ID NO: 2138 - DNA, 201 bp, Homo sapiens
gcagatcatcccactgcactccagcctgggcaacacagcgagactgtttcaaaaaaaaaagaaagaaagaaagaagcaaataatcagcatcattcctgcamggagggttctgattcaaaacaaaacacagcagaatgcattacctggccggatttgatagctaattcttctcttaacttctctaaagtttccgacgtttcc

SEQ ID NO: 2139 - DNA, 201 bp, Homo sapiens
tataaatctcgcatagctaatcaagaaactactgtaaacaaaggatcctagatgtcttgactcagggtgcctggcacataaaaatatttaaagattaaagmaatgtctgaagcacagaagtgaaggaagttaccaaggctggtcaaaagctaatcctgtgtgcaacgaattctcaatctcatgtttgcgtctatgatcatc

SEQ ID NO: 2140 - DNA, 201 bp, Homo sapiens
catcctgtctaccgactgcagactgagggcccaggatgggcagcttggccgccccccaaccaggagaccgaggccaggcccagcccaggccagcaaccccrtgagaaggacttggacccactggtgagcagagcctccccgactttctcgtgtggcgacagctgcctcctttcgggagtgagacccggacatgctctcaca

SEQ ID NO: 2141 - DNA, 201 bp, Homo sapiens
cccggatgctccggcggagacgtggccgtgagaggggcggggcgagcggtgcatcggcctcgggtccccggaaacagcctgcacgcgctactttcgttccrgaacagagaacgtcctcctcttcttcaagtggccaccctagggccggggaccctctgcccacagggtccggatcgagctcacctccgactgtgatgaggc

SEQ ID NO: 2142 - DNA, 201 bp, Homo sapiens
ctcggccggctttctctttcctagtattagaatgtagcctctgtgacgccagcttgtcaccttcctctgtgtcatccaagacccagtctcacagcctcatrggcggaccggctcacatggagtcagccctcacagcggctgcaccagggacccctggctcaggagatcccaagacctgagagatgagcccaccaagcggcc

SEQ ID NO: 2143 - DNA, 201 bp, Homo sapiens
gaagtggaggttgcagtgaaacgagatctcgccattgcactccagcccgggcacccagagcaaaactccacgtcgaaaaaaaaaaaaggtagaattttagscagggaacatgataaagacccatagatcccttcagggaaacactgctgctgccccacacgtttaatggagttctgtttagcaggaatgtgcctgatctaa

SEQ ID NO: 2144 - DNA, 201 bp, Homo sapiens; identical to SEQ ID NO: 1803

SEQ ID NO: 2145 - DNA, 201 bp, Homo sapiens; identical to SEQ ID NO: 1752

SEQ ID NO: 2146 - DNA, 201 bp, Homo sapiens; identical to SEQ ID NO: 1753

SEQ ID NO: 2147 - DNA, 201 bp, Homo sapiens; identical to SEQ ID NO: 1754

SEQ ID NO: 2148 - DNA, 201 bp, Homo sapiens; identical to SEQ ID NO: 1756

SEQ ID NO: 2149 - DNA, 201 bp, Homo sapiens; identical to SEQ ID NO: 1757

SEQ ID NO: 2150 - DNA, 201 bp, Homo sapiens; identical to SEQ ID NO: 1758

SEQ ID NO: 2151 - DNA, 201 bp, Homo sapiens; identical to SEQ ID NO: 1759

SEQ ID NO: 2152 - DNA, 201 bp, Homo sapiens; identical to SEQ ID NO: 1760

SEQ ID NO: 2153 - DNA, 201 bp, Homo sapiens; identical to SEQ ID NO: 1761

SEQ ID NO: 2154 - DNA, 201 bp, Homo sapiens; identical to SEQ ID NO: 1762

SEQ ID NO: 2155 - DNA, 201 bp, Homo sapiens
gctgggattagaggtgtgagccactgcacccggcctattattattattgaaagtaccacataatgatccacacagatttttaaaaacatttttcagatccrtgatctcatttaattctcactaacacccctttaggtattattattactcctattttacaaatgaggaaactgaagctcagagaagaactaacttgccaag

SEQ ID NO: 2156 - DNA, 201 bp, Homo sapiens; identical to SEQ ID NO: 1811

SEQ ID NO: 2157 - DNA, 201 bp, Homo sapiens; identical to SEQ ID NO: 1812

SEQ ID NO: 2158 - DNA, 201 bp, Homo sapiens; identical to SEQ ID NO: 1813

SEQ ID NO: 2159 - DNA, 201 bp, Homo sapiens; identical to SEQ ID NO: 1777

SEQ ID NO: 2160 - DNA, 201 bp, Homo sapiens; identical to SEQ ID NO: 1778

SEQ ID NO: 2161 - DNA, 201 bp, Homo sapiens; identical to SEQ ID NO: 1781

SEQ ID NO: 2162 - DNA, 201 bp, Homo sapiens
atggacctggaagacccctctgcccatgacctcatatatacagcaacatgactctgagaatcagctgagcactaaaaagcatcctcccatcacattcctgkaagatccacttcaggttggaatatgctgggctgccctaaccttggcccctggtgtatatgcctggaggagacctgagagcctctgtccccaccccaacct

SEQ ID NO: 2163 - DNA, 201 bp, Homo sapiens; identical to SEQ ID NO: 1822

SEQ ID NO: 2164 - DNA, 201 bp, Homo sapiens; identical to SEQ ID NO: 1826

SEQ ID NO: 2165 - DNA, 201 bp, Homo sapiens; identical to SEQ ID NO: 1829

SEQ ID NO: 2166 - DNA, 201 bp, Homo sapiens; identical to SEQ ID NO: 1786

SEQ ID NO: 2167 - DNA, 201 bp, Homo sapiens; identical to SEQ ID NO: 1833

SEQ ID NO: 2168 - DNA, 201 bp, Homo sapiens; identical to SEQ ID NO: 1835

SEQ ID NO: 2169 - DNA, 201 bp, Homo sapiens; identical to SEQ ID NO: 1836

SEQ ID NO: 2170 - DNA, 201 bp, Homo sapiens; identical to SEQ ID NO: 1787

SEQ ID NO: 2171 - DNA, 201 bp, Homo sapiens; identical to SEQ ID NO: 1838

SEQ ID NO: 2172 - DNA, 201 bp, Homo sapiens; identical to SEQ ID NO: 1842

SEQ ID NO: 2173 - DNA, 201 bp, Homo sapiens
aaatcctataaacagcatgtgatcatattgcttctagaatttatgattgttttcttccaaaaggaagctaaatttagcctagtaattctacatgcgctcargaaaacaatgcctgctgtgatttctagaataaatgaatgtgaaccacagttcctttacttgactaacagagaaagtttaaatatcaacctagtcattaac

SEQ ID NO: 2174 - DNA, 201 bp, Homo sapiens
cccggggacgatggggcaagtgatgcccatgtcggtgcatgccttcacaaagcggaagaatgtgtcagcctcaaagaaaagctgcgtgatgatgaaatcgrctcccgcagacaccttctccttcaagtgcttcaggtcagcctcaaagctccctgcttcggggtggcctttggggtaacctgccaatagggatgacagtca

SEQ ID NO: 2175 - DNA, 201 bp, Homo sapiens
gcgttgcaggctcgtgaacaagaacaggaagcgtgctcgcttcggcagcgcatggactaacattggaacggtacagggaagatcagcagggcccctgtgcmaggacggcacgcgaattcctgaagtgttccaaataaataaatgagtaagaacaggaagtggtactgggcgtttcaggaataataacgagcagcggggaac

SEQ ID NO: 2176 - DNA, 201 bp, Homo sapiens
gaaggtaacacggcgaagccccgcccagctgggatggaaggcgccgttggaaggaacgtgaggcacagttggaagcaggcaacggtgggcgttgcaggctsgtgaacaagaacaggaagcgtgctcgcttcggcagcgcatggactaacattggaacggtacagggaagatcagcagggcccctgtgccaggacggcacgc

SEQ ID NO: 2177 - DNA, 201 bp, Homo sapiens
tttatgttatctctccttcctagcttttttttttttttttttttttttttttggcttaggcagctaggaagcccagagctctatcttcacctgaagccacragcatttgaggaattatgtgctcaatattgttagatgccgcatatgcacagaaatagaggaagttacacgggtttcagcctcgttgaagaaaagcatcga

SEQ ID NO: 2178 - DNA, 201 bp, Homo sapiens
agccactgcgcccaggctcaaaatagtccttcttttagcttttatgttatctctccttcctagcttttttttttttttttttttttttttttggcttaggyagctaggaagcccagagctctatcttcacctgaagccacgagcatttgaggaattatgtgctcaatattgttagatgccgcatatgcacagaaatagagg

SEQ ID NO: 2179 - DNA, 201 bp, Homo sapiens
aagtgctgggattataggtatgagccactgtgcctagccagacagtttttttaaaagaaattcatcttcacattgtgactatcaatgtatcatactaatayctgaaaagctcatacagattcagagttcaaccacctcactcccctaaccgcacccccctccccccacccgccaaaaaaaagaataaaaaaagaacagtgg

SEQ ID NO: 2180 - DNA, 201 bp, Homo sapiens
cagtacttctgaaaaacattctccattcttcaagcaagcttgtactgggcatgcactgttctcagggctgccagtataaagtgtaggggagaaaaacattmtctgactttctacccatcttagtttcatgggttagggactgccaattagacagacaaaagatagattagcaagagataaacaaacagaaattcattaacg

SEQ ID NO: 2181 - DNA, 201 bp, Homo sapiens
agtaaccctccctcccctgagctgtgaaaaccaaaaatgtcttcagatactgccaaatatctctttggggacaaaatcatctcgttgagatatcattctckatgtctatcatagaaatagaatgactaaaaagaagaaataatagaaaaatgtggcattactaaaaacaatcgtagtatgtccgtctctgtacattttgag

SEQ ID NO: 2182 - DNA, 201 bp, Homo sapiens
actttattttttttttatgattgtggtcccatcaatttaaattttcctttacactttcaaacaaggtggccacacactcgactccattgttcttctggggktagacaagtgtgaggtgaccccagttagggatgccccaacaggcattaagttgacagcacaagagcttccatcgcaaccctctagacactgcaaccgcca

SEQ ID NO: 2183 - DNA, 201 bp, Homo sapiens
cttactctcaccccagccctgaaccgcattcctcagttaacatgtaactctccatacattctgtacttctcttgactagtagaattggaggggtttataaygctgacagcacgttagctcagaaactatggcagcagccaggtaaaagttggaagtttcctccaccactctgctttcccagacatctgtcaagagcgaggc

SEQ ID NO: 2184 - DNA, 201 bp, Homo sapiens
gttgtaaataatcttctggcagccaaacccctttttcgttccctcattaaggagggtttatacttaggaagcagccaccacttccaccactgagctggcaytggcgatacgacaatgaacaagatacaaatggcctttacccttatggagcacgcagtccgtggtaaagaaagcaagaagataatcaattacagaccaacc

SEQ ID NO: 2185 - DNA, 201 bp, Homo sapiens
tggaggccgtttcccaggagggccagtccactgccgctcctgacacatcgaatccgctgttcacacattcccacctccccagaacagggcctgttccatgytcaaaactgctgtctttcaaaccgttcggcttctcatctcttaaaaagtcctgagatcagaatgcttgcacaccatctgttgttctggagccttctacat

SEQ ID NO: 2186 - DNA, 201 bp, Homo sapiens
aaaattaacatacagagatcaattttaatttcctgatgaggccaacagtaaaaaaattaaatgttaaatagacacactcaagagcagcaaaaacaaaggcrtgtaattagaaataatctaatagaagatagggaggaaattatactttattgagtgacattaaagaaaagttcataaatcaagagacatgcttcttcatgg

SEQ ID NO: 2187 - DNA, 201 bp, Homo sapiens
aggaactcagctacaggcgatgcccgatcaggttgaggtttggaatgggccctggatactggcatttttaaaactcttcccaggtggccgggcatggtggytcttgtaatcccagcactttgggaggctgaaatgggaggatggctggaggccaggagtttgagaacagcctgagcaacatagcaagatctcgtctcaata

SEQ ID NO: 2188 - DNA, 201 bp, Homo sapiens
ggtttattttgccaaggttgaggaagcacctggcaaacagagacacaagccactgtaggatctgtggcaccccctttttctgaagaggattttgagggctwcaatatgaaaaggggaaaaggaggcaggaggggaaaagaaggaaaaggagagggagggctggtcacgttctttagaatccacatgaaaaggagcgggtag

SEQ ID NO: 2189 - DNA, 201 bp, Homo sapiens
atagtgaaccttgtatctcagaatgtaagttataggatatcaaatggggaatgtgactcaactagaataataaaaatgatgtaaagttgcataaagagacygtattttcttttacaaagagggttaatgtattttcaattttacacgggatagttgctttgttagatggaagcataattttgatgtttcctttatttcgaa

SEQ ID NO: 2190 - DNA, 201 bp, Homo sapiens
aactccccaaactataataccctcttcatgtgacacgccatccacatcacaccccattaacgggatatgctgtccacaccacaccctgttcatgagacackctgctcaccttgcaccctgttcatacaacaacacaccatccgcctcgctccctgttcatgccacccacatcacaccctgttcatgccacccacaccacac

SEQ ID NO: 2191 - DNA, 201 bp, Homo sapiens
gacagatcttaaacaggatgtaaagccggcagtcttgctgaacaggtcatattgtggctgactctgacacagcatccttatctttttttcctttttttatkctccacagggcaagtcctaagcatccctatcttaacttcaacagtccattctgctaactccaaatttttagacaaagttttgttcctttcaccaactaca

SEQ ID NO: 2192 - DNA, 201 bp, Homo sapiens
gcattgcccattttgccggcgaggtgtactaccaagcagaaggtgggtgcagctctcctctcatgtcccttccaaatctggaccgggttccagggagaccrtggaaagcaggctcagaggatgaggctattttgcagctctagcaatggggcagagggatgagtagtatggcttctactggagaaagaaaatggagtggac

SEQ ID NO: 2193 - DNA, 201 bp, Homo sapiens
aaggtgggctcccaggcaccctcctgggtctgtcacccctgatggctacagggccagacagacatgtacaggaaagactgttttactcacctctgggtccmcagcatgcagttggcacttgggaatcctgcaatggatggatggatgggtgaatggatgggtgggtggatagatgggtgagtgggtggatgggtagtgggt

SEQ ID NO: 2194 - DNA, 201 bp, Homo sapiens
cattctcaaagcaatgggaagggatagacttttcataaactgttctagagcaatggggtgtccatatagaaaacaaaagcttgggccaccatctcacgccrtgtgagaatattgcttccaggcaagctgcagctgggctgatctgtcgtctatcagccagactgcacacttcggccagggaaaggtgggtgctaaccagag

SEQ ID NO: 2195 - DNA, 201 bp, Homo sapiens
ctagagaagttctgcttattttgctcaagaaaagaagcagccaagcttgaaaatttagacagcgaatgggaaactttaaagacattatagatttataaacraaccacatagaaattccattctaaaattaaaaaaaaaaataaccaaaaggaagaacccaatggatggtttaagggattctgtgcctgtctaggagatgga

SEQ ID NO: 2196 - DNA, 201 bp, Homo sapiens
gatacaaggtgggctgaaaaggtaggcaggctatgatgctgaagatccttgagtgtcataaagatatggcacattcttagctgtgggaggcatgacacggycaacttttgcatcttctaaagatcacttgattggtgtgatggaggatgattgttctgagagtccagcagcagcaaggccacctgggatgcttccaacctc

SEQ ID NO: 2197 - DNA, 201 bp, Homo sapiens
aggctctccaagagcagggtctcttccccggggctgccttgccgtcgctgactgcctcctaaggaagctggatttctctagccaaattgtgtcatgttgtmggatttttggcagtgggttggctggccctgtgcccactgggagaagacaggatggaggactgtaacttctcattcttaccctgggcttgcctgggcagaa

SEQ ID NO: 2198 - DNA, 201 bp, Homo sapiens
tgtaaaccaagcattttagtgcaaagcagtgaacgtcactacaaagtgctgtacaggatccactggtagcagagggtgtcagacttcagttctgattgagrggaatagcatcaatgagtctgaaggaaacagttgaaccaggtctaaaactgcaggctggactagaagctaaataggccgacacttgcccatacctacacg

SEQ ID NO: 2199 - DNA, 201 bp, Homo sapiens
cttttagctgggacccaaaagggcttcccccttaaggttcaggtaagccagagtaaacaaatccacgtgtgaacttgcaaaccaggttgtgagcaaggggyggtctggggattaagttgtcctgacctgtgaacacccccaagcacctaacggcagttattgacagtcctcgctggaaaaaagcaccagcaagttagatta

SEQ ID NO: 2200 - DNA, 201 bp, Homo sapiens
aaaccaggttgtgagcaaggggtggtctggggattaagttgtcctgacctgtgaacacccccaagcacctaacggcagttattgacagtcctcgctggaaraaagcaccagcaagttagattacaaatgattcctgtgagtagtttttcaaacacaacatccagcatgaagccaggaagaaataggaacaaggaaatgaga

SEQ ID NO: 2201 - DNA, 201 bp, Homo sapiens
cacttgagcccaggaggtcaaggctgcagtgaactatgatcacaccactgcacttcagcctgggtgacagagcaagacctgtctctaaaaaaataaaatgrggcttgccttatgaaatctaggttgcatcttccttgaaggcaaaataggcagatgtgagataacctatcttgttccttaactgctgggagaagtagctgg

SEQ ID NO: 2202 - DNA, 201 bp, Homo sapiens
gcaaagagcccagcacagagaaaatccttatcacatgccagctctttctgagactgagaattcaaaaatgttctaaagagtagttcagtcgcagaggtctrtgctgccaaccttgctgtttcatagggttaatggataatttggctgctgtagcctagatgggaatattagggccaccataagcaagtgacttcagttagc

SEQ ID NO: 2203 - DNA, 201 bp, Homo sapiens
ggcatcaacctggcactggcctggagcggccaggaggccatctggcagcgggtgcgtgcccactgtcccttccccaccctcctctatggcgggagccaccstaggtgttttcacccgccccccagcatgggcgcagtgtctctctctagaagtgctttcagcgtgcacagtggcttgggcctcctaaaaactgaggcttcc

SEQ ID NO: 2204 - DNA, 201 bp, Homo sapiens; identical to SEQ ID NO: 2079

SEQ ID NO: 2205 - DNA, 201 bp, Homo sapiens
ttataagacaaaaaagaaggggagtgttaaattccaaacagctgctttacttaagatgcgattacgcttcagagataccaatgggcattgctgtgttcagyagaaagaaatgtaaatgaaggctgacttgattgtggcatttagagggaactcctggtacctggaaatgtgaatctggactcttacctgtgtcatcaaagt

SEQ ID NO: 2206 - DNA, 201 bp, Homo sapiens
agctactgacccattgcttattatacgttacagttaaatcgagttgtcagagcatatccaaaccatctaaaagcagtgacagcagcagctaaattgatagraactttatctgacctagtattagggaataaatgttacctacaagttacacgtgcagttgaaagctcattaccttccagtcagatccaacatgtcttaata

SEQ ID NO: 2207 - DNA, 201 bp, Homo sapiens
gtccaggaagcagatagcagaggccgaggcctggcttttgctcctctttcctgctgctaacttgactcagggagctgctggccagactcggtgtccagctsgggggacactccagctcccctccccctggcttctgggaacctgaggccccgtcaagtcgctcaacacacattcaggcccagccggctctgctaggtagtg

SEQ ID NO: 2208 - DNA, 201 bp, Homo sapiens
taagccattatttcttcaagtactttttttttttaagttcagctttttattgaacacattataaaagaggtttcgtcaaaaagaccaaagcccatgtcacyatcagacttctcggattcttctttctttgcttccactttcttctcctcagctggagcagcagcagcagaggcgggcagaagctcctgctggtacagatag

SEQ ID NO: 2209 - DNA, 201 bp, Homo sapiens
accataaaatttatataaatgttaaaagcacagttcaaactgaattataatttttcaggaggtttgcttgcgtgccatattaaaatatccctgatgaaacrtatttcttaaaaccactaagaaaaaagttcttgcaatgggaaaatgatttatttacctggatcttctatagttaagttctttatcaaccattgaacaatg

SEQ ID NO: 2210 - DNA, 201 bp, Homo sapiens
tgtctgcagttttcaaatgtttattaagtggcttggtatgcatttcgttgggcttatttatcctatttgggcttctctcagcttcttcaactgaaggtttrtatctttgctatgcttgtgatgtttttaagccattatttcttcaagtactttttttttttaagttcagctttttattgaacacattataaaagaggtttc

SEQ ID NO: 2211 - DNA, 201 bp, Homo sapiens
tgggtggcttgaagacacagcatgggttgaaaagtgatctgagcagatgcaatgatataaatatggctatatcaaaaagggttttaaatataagctaaaaygcttgtttgaacattatcctgaggaaaatggggggatctattagttattgaacttcagaagagacatgattagatctgagttttggaaagatcattatag

SEQ ID NO: 2212 - DNA, 201 bp, Homo sapiens
cccatccactgagttttcctttttgatgttgtccttttcagtcctaaagtttccatttttttataacttctatttctttgctgagaatttcagtttatttmctgaggccttctagtttgtaatatgcttaaagcatattattattattattattaaataatttttatcatagatcaggggtgtccaatcttttttggcttc

SEQ ID NO: 2213 - DNA, 201 bp, Homo sapiens
aaataatagtaacagtattaggtgattataaaatatggataagtgaaatgaacaacagcagtgtcgtaaaggaagaaagggatgaattgggaatattctgytacaaggtaccttcatggtatatgaaacagtatagtgtaatttgaacatggagttagattaattaaaatgtatatcgtaaactctagaacagctgctaaa

SEQ ID NO: 2214 - DNA, 201 bp, Homo sapiens
atttgaaaatcgtatcagatgttacaattgaggtttttagactcattatttttaaaagggtgaccttttactgtacagcaggaacctgtcttgtgtggttwgagacaaatgacaatgaagagatggatatgttcctaggatcatatttaggctataaaacatctatcagtgcccttatcacactttttgtactgctgtagt

SEQ ID NO: 2215 - DNA, 201 bp, Homo sapiens
gagagatgaactccagcccagctacagactatgttctctaaccccttgatctaagaaatctcagcaatggcaaaaatctggatatcaccaattaatggccrgtgtcctagttctgtctgcctttggccaaaagcgggtactgaaaaaagagaaaagcagccactggcttccaggaactggctgggcactcacagctatgtc

SEQ ID NO: 2216 - DNA, 201 bp, Homo sapiens
ggaaaatcttttatttgaaataagagtaagaagtcaattgagagaattccaaaaggtgccccaaagcaaaaacaaaagattgaggtttaaatgaactgtayggtataaaaaaggcaacaattttaaaagtaagatagtaaggataaatagtaaaatagtaaggctttctaattaagatacaaaacctagcagccataaaac

SEQ ID NO: 2217 - DNA, 201 bp, Homo sapiens
agtggggaagcccagcaacgcctgtccctctagattcttctggcctctctgagcagcattccttccttctgggtatggggcagagctctctctggactggrggtcttaggacctacagtccaacaaggcaggtcagataacttctttatgactacttttacggctggctttgaggagaaggggttctgatttccatgaccc

SEQ ID NO: 2218 - DNA, 201 bp, Homo sapiens
gagcagcattccttccttctgggtatggggcagagctctctctggactgggggtcttaggacctacagtccaacaaggcaggtcagataacttctttatgrctacttttacggctggctttgaggagaaggggttctgatttccatgacccgcctcgggccagagggattctagtctctggggagaatggaacaggtcagg

SEQ ID NO: 2219 - DNA, 201 bp, Homo sapiens
cattctttatggtgactgttccaatctttcaccatggttcaatttctcaatcacttctatgaagttgctcaaaacaaaagcaatatacagaagtttaactraaaggtatagccctatttgacagagggataatttatacatacagttttgcacagattatatgcacagaattttagtccaaaacttgcaaagttctgacaa

SEQ ID NO: 2220 - DNA, 201 bp, Homo sapiens
gtgaatccaggagacagaggttgcagtgagcggagatcgtgccactgcactccagcctgggcaacagagcaagactttgtctcaggaaaaaacaaaatttkcagaaaatcagagaagataagtctattgtatttcttacatgtttgcttaccacgttttgttcttatctgatattccaaggttccttttcttatcgtttcc

SEQ ID NO: 2221 - DNA, 201 bp, Homo sapiens
aaaatgttttaagaaaaatgtatacattataagtaactacatgtgacatttgactcctgtccctaggcaggggctgctgaaacatctaccaaccaatatcyatatccaaacatccaatatccaaacaaccaatatccaatatcccaggaagacttggcagatcagttcgtgagggccaagggttcactgatggtgctgcca

SEQ ID NO: 2222 - DNA, 201 bp, Homo sapiens
ctctctcccagtcttctctgcttaagctctggtgaatctcccttcctggagccctctatgtggctgctgtcacgctctgtctactctgctatctttctctscggctcctgacctagttttccctaccttctgactcctgctctctatggttaaaagtctcttaaaaatctatctctgctgtagcttcccctttcctttgtt

SEQ ID NO: 2223 - DNA, 201 bp, Homo sapiens
gacctttcagtacattctaggtttggggactttgttgtgcagagcaattggataattatacaagtcaatggaaacaacagtcactcgttgcattacagaaygcagtatttaaatgcaaacgcaacaccaaaaacaaataaggtggggagtaaaagaaaagagtgtggctagcttctaggttaaataagacagttggtccca

SEQ ID NO: 2224 - DNA, 201 bp, Homo sapiens
gagacagaggttgcagtgagcggagatcgtgccactgcactccagcctgggcaacagagcaagactttgtctcaggaaaaaacaaaattttcagaaaatcrgagaagataagtctattgtatttcttacatgtttgcttaccacgttttgttcttatctgatattccaaggttccttttcttatcgtttcccttttattta

SEQ ID NO: 2225 - DNA, 201 bp, Homo sapiens
gctctctatggttaaaagtctcttaaaaatctatctctgctgtagcttcccctttcctttgtttctctctatattctttcttccttggcaagctcatctawtttaaaaggtctgcttaccaaatgtgtacctcagtcatcatttattcaatgtaggagaacaaaacccactagacaaggtgccagctctgtctataggaag

SEQ ID NO: 2226 - DNA, 201 bp, Homo sapiens
aatttcgtccatttagatttgttcagtctatgagatgcccatgaaacgtccaagtagagatctatagcagacaagacagttggccaggagctcagaagagrgtccagaggtatatttgtagtggttatcataccaacaatgggcaaaataaggaagtgcataaactgtgaagagccaagaaataagaaatctcatgcctgg

SEQ ID NO: 2227 - DNA, 201 bp, Homo sapiens
aaatgttttaagaaaaatgtatacattataagtaactacatgtgacatttgactcctgtccctaggcaggggctgctgaaacatctaccaaccaatatccrtatccaaacatccaatatccaaacaaccaatatccaatatcccaggaagacttggcagatcagttcgtgagggccaagggttcactgatggtgctgccaa

SEQ ID NO: 2228 - DNA, 201 bp, Homo sapiens
aagtacatattattacctttgcaggttggtggagtagctgaccatcttccagaagttgtgcattccacattattgggcccctccagcttaaagccgttgtyacaagagaaatggcaggtggagccaacattgaattctccacgagtgtcagaacaatccaggctgccctgctctggggcaaagagttctgggcacttgatg

SEQ ID NO: 2229 - DNA, 201 bp, Homo sapiens
gtccaagcccctcactctgtagccgggctggcactcaaatttacagctggagccataggcaaaagcagtgagcggatgaacacagtccatggttccttcaytgggggcttccaggtgctgacactgcacagctggagagaataaccaaggataaagagaaagatactgagaaaggagaaaagccacacagagagcaatggt

SEQ ID NO: 2230 - DNA, 201 bp, Homo sapiens
aagtttaaaagtactcacaaaatctaataggcaattcaacataaaactccatggctatcgctgttcctcactttctgaacctttacctgcctgactttacyccataccactccaactcacttcaaccacttcccatgcagaaaaaaataaactcaccatctcctctgtgactctgctggttttctgccttctgcccaaccc

SEQ ID NO: 2231 - DNA, 201 bp, Homo sapiens; identical to SEQ ID NO: 619

SEQ ID NO: 2232 - DNA, 201 bp, Homo sapiens
atatgtggatatgctgtgctacatgatctctatgtttcctctcaattctgagatactaaaattctataaaccatgcaaggttctataggaagaagttcctrtggcagccagtgaatttggtgaagctgcactgagacactgggaagggttcaaataaagagaagatgtaggaggcaatagcagctaaatggatacaggttt

SEQ ID NO: 2233 - DNA, 201 bp, Homo sapiens
tggaagtcatctaatttactcctgtccttttataaaagaaggagacataagtaatttgcccaagctcagattaaatgacatataaaatgtcttaagggcargctctacctcttcacatggaaaataacatgctttatgacctggagcctaccagttggtccagcctcattgcccactgtatgtactttctcagcaaaacag

SEQ ID NO: 2234 - DNA, 201 bp, Homo sapiens
ccttcccaccttaactaagggtagaagcccctgcaatgtgctcccacagcctctgttcttgcgctgttcatacatgattgtcattcttccccattataccrtggtctcctcgaagttgggctcagtcattcatagttttattctggagctgagcagagtgttttgtacattgaaagtgctcattaaatattgacattatct

SEQ ID NO: 2235 - DNA, 201 bp, Homo sapiens
acctttttttttttaataagttatccagtctcgggtatgtctctatcagcatcatgagaacagaataatacactcagcaatgtgaataataaggataatartcaccaaatacatagacatgtaaggaccattaaatgaatttaatgtgtttggaacaatacctatcacgctgttaagtgtaagtttaagtgttggctatta

SEQ ID NO: 2236 - DNA, 201 bp, Homo sapiens
caatgaaagtgctccctcccatgttcctctctgaattctatttatctcattacactggtgcattcaaatacacaagaaatagctaagtccctttgagactyctgagagtgtgctagcatagggattcagtcatgagtatatctcatgaagcccatggttttgttgggggtgggggagcagatattaaataaaaatcacaca

SEQ ID NO: 2237 - DNA, 201 bp, Homo sapiens
taccaaaaaatctatttagagatttttgtgaagacattatttgtaagagcggaatattgaaaacaaacacaaatgccattaattgagggtggaaattaatkatggtggatccatgaaaagaatgttaaaggtcactaaaaataatatattttaacttgtaaagataggagagaggtctcaatgtatgatgttaaataaaaa

SEQ ID NO: 2238 - DNA, 201 bp, Homo sapiens
gcttgaataatcccttatgatccgttttaagtgtgtcaaagagctcattgtgtctttttctcccagataacatatacaatacattccataactcagactargtgtcagcatcatggtgtatagccatctattctattgccttcttgttttttctttttttttttttttgctgttcaattttttattatagtgagatatacg

SEQ ID NO: 2239 - DNA, 201 bp, Homo sapiens
ttttagtaaaaaatatgtatctgcccactttcactcaaatgttgaaagtctatacaaagtgaaaggtatggcaaataatgtagaactgtctagtcttttayccattcaactttattgttaaaattgtatatacatcataaaaatattaattgcataggaggaaaagcggagaaaatattggaagaattcataccagaagcc

SEQ ID NO: 2240 - DNA, 201 bp, Homo sapiens
actttcttaaaaacaatctgcctaaaatacacctttctcccactttataagagaaaaattataccttttactaatttcttatttattccagagctttgccyttggatataaatacattcgtatgccagagatgattcgaaatattggtataggtattaagaatttgaatattgtaaatgatattgcagcaaatccgttttc

SEQ ID NO: 2241 - DNA, 201 bp, Homo sapiens
aggaattgagacattgctataataaaacttctaattccatttacttattcatatgaatgaagtttctcaatgtttaaatccttgaaaatgaaatatgggartaatattgatgccaaacttgtctaattttgttgataagtaatattcattcatggatatatgaacaaatgagggaaagctcctcctgtcttagagatgaat

SEQ ID NO: 2242 - DNA, 201 bp, Homo sapiens
catgaaaaggacttcaggtcctgaagggcaaaggcagagacaaggctgaaaaataaccgactctctgtatccaagggttctgcatctacggattcaactcrttgtggatcaaaaacattcagaaaaaaaataaattatataaagttccaaaaagcaaaacttgaatttgccatgtgctgagtatgttgaatccatgcagat

SEQ ID NO: 2243 - DNA, 201 bp, Homo sapiens
acaccccaatgaccttaccagaaaacaatgacaaatgattggaaacacagaaatggaggaaaatactttcttccccctttcccaaccaagtggtggaatckgcgcccaaattttggctctgttacttgctagcaatctatcactagacaataacctttctgagcctcagttgctttatcttcgaaatgggaaaaaggaaaa

SEQ ID NO: 2244 - DNA, 201 bp, Homo sapiens
tgattaatagtgctatgaacatgggtgcacaaatatctcttcaagacctgctttcaaaccactgcctcattttaaaatcaaggtatacttaggaacccagrggagtcacatagattgctcagaggtctccgtaaatgaaaacacaaaatgtcaatattacacttctggaacatgactttagtgtgaggtactcctcgtaaa

SEQ ID NO: 2245 - DNA, 201 bp, Homo sapiens
tagcatttatctgctgttctgcaggaagtctttcagacttcgaatgcctaagatggggcagccaccactccccaccactgagactcagtgagcgtaaatgrtttgcccaagcttgctcacatgaatgtgcatagggttaacacagttattcttattcttccagggcttatgaattttgaaaatctgataaaagccgtggtc

SEQ ID NO: 2246 - DNA, 201 bp, Homo sapiens
cttttcagcaaaatcttatttaatcctcatgatgaaactatagagtattattactatatccattttatagaagaagaaactgagtcattaacaagattgartcttagggcagaaaaggaaactatgtggatattccagatcagtcccagaagattcataggctcacagaaagaaatgggagggatggggatgagaaactat

SEQ ID NO: 2247 - DNA, 201 bp, Homo sapiens
tcaagagaccctaatgatgtttgtccagacttggattaccagttcccagggtgatctgagtctgttaaaaacaaagattcctccaagctgtattcttaatrtcctctattccctatacttctataaacctgtctcagtaggtcttctagtgtccacttatagatgtagaggccaccctttctaatcttatggggaaattat

SEQ ID NO: 2248 - DNA, 201 bp, Homo sapiens
catgaagagtgagtgagaccttgtggcagcccccatggtccactgcgacggactcccagcctgcgagtgaccttggagaggctctgagctgtcccctgctmagggctgagtcctctctgaatccctgtctgctgggatgtggccagtgatggggacctcactacctcacccagccaccctctctgacggccagagctgaga

SEQ ID NO: 2249 - DNA, 201 bp, Homo sapiens; identical to SEQ ID NO: 1933

SEQ ID NO: 2250 - DNA, 201 bp, Homo sapiens; identical to SEQ ID NO: 1934

SEQ ID NO: 2251 - DNA, 201 bp, Homo sapiens
aatttaataaattgaatactgattttcaaaaccccagtaaatctcagagtggtcttttcagtgcgcaaaagccaccctcaaggacataagacataaaataytttcctaaccagtgagtcttcagcagtgcagggggagagaacggaagtgggaaagggagaaaggaaagtaagattttagtgtcattggattgtcttgttc

SEQ ID NO: 2252 - DNA, 201 bp, Homo sapiens
ttttggtatatttgcattatatacttattggctgagcatcccaaatctgaaaatccaaaacctgaaatgctccaatgagcacttcctttgagcgtcatgtyggtgcccaagatttttcccattttggagcatttcagactttggatttgcaatgctcaacctgtagaaggagcgtatactaaaaccaaccagaatgcacat

SEQ ID NO: 2253 - DNA, 201 bp, Homo sapiens
cctggcacgcagagtgctggagccaagataactctgcctgtgctgcaaatcacccctcaggtaacaggcacagtgagggtcgtggtgggggtgacagttgkagctggaatgagggttggtcttagaacacccttctccctgcattgatgatcaaatgtctccttgttctccttcctcacaggacgtgcacaaggacccgga

SEQ ID NO: 2254 - DNA, 201 bp, Homo sapiens
aatttgttcataataattttccatagatgtttgttaaatactatgctctgggatattttctcatttggatattctccgtacaattttgagccaagatagaraaggaagcgcatggactggtagaaaatatacagttctgggtttcacttatagtatgatattaggaatttcatttaggttttttcatctgtagaatgcaag

SEQ ID NO: 2255 - DNA, 201 bp, Homo sapiens
ttagagttgtcatcgaatcaaattaaagaggtaagaagtaaggtaaaattattttgcattctgcctttaaggtggatagtccctatctgtgtcacatacayaggaatgtaatgctctctagcctctgcctgtcttccagcaatccttcccacctactgcttgggggcattggtgtcatcctcctgagagctcaggcagccc

SEQ ID NO: 2256 - DNA, 201 bp, Homo sapiens
ataaatcttggtatttaggttgtacctaaaaatgataacttttagactgtaatcagaggtagatgctatcaatttgttagtgaggaggggaggagttttcratgccacttagtttacaatgtctaattgttcaaatatacatctaggttgtaaaggagactcaacggtaagttatagtgaccattgaaaaatgtaaagggg

SEQ ID NO: 2257 - DNA, 201 bp, Homo sapiens
tcacgtactcaggacatctgtttgcttatggtgttatgttacagatgtcacaaatgaaaatcagagacatgtagccctgagcccagtaactataaagcggwctagctgaagctggagcccacaagagggcactttgcaccatgatgcacgcttgtttcttgccatcagctctgcaatgagttcaagctaatgccatgtccc

SEQ ID NO: 2258 - DNA, 201 bp, Homo sapiens
tattttcacaaaccattctttattctttgtgtgcattgggcaagagtcatcagacttttcaatggtggaactcttccacttttgtttgaggacttctgggyagacagggttggcttatttagcttccttttctcttaggtcagttccccaggaaacaggttttgggatggaggtttgcatgaaggaagtttcaggggtgct

SEQ ID NO: 2259 - DNA, 201 bp, Homo sapiens
tcttaggtcagttccccaggaaacaggttttgggatggaggtttgcatgaaggaagtttcaggggtgctctgatttataagtgagtgaaataagctggatygggaagagagagaataattaactctgatgcaattcacaattgcagctgagttcttagccagccccatggggagctctggagctggaatgaccctagagaa

SEQ ID NO: 2260 - DNA, 201 bp, Homo sapiens
cagattttggatgggccagcgcatgaggtggggaagctcaaataccagaccaaggaagtgagttagtggaaatgaggagccataaagatgcttttatggtrgaaggagcatgggttgaagagctgggttttaggaagagtgagatagtgggatcgattaggaacagactgaagttcttgagatgcccctatttacatagga

SEQ ID NO: 2261 - DNA, 201 bp, Homo sapiens
agatggtatactaccttctcctctcagaaatactcaatgcgtaccagcatattgaaaaactaagatgccggctataaagaaagctatttaaccttcattaytgagtcagttgccaaaccaacttgattatagaacgcttctagtggtaactgttatcagcatcgtgacaaaggcatgttctgcatagcacaattttgggaa

SEQ ID NO: 2262 - DNA, 201 bp, Homo sapiens
gatgccggctataaagaaagctatttaaccttcattactgagtcagttgccaaaccaacttgattatagaacgcttctagtggtaactgttatcagcatcstgacaaaggcatgttctgcatagcacaattttgggaacactctaggtaaacttaattattctagttctagcacctcctaagaaattctccttttcatacc

SEQ ID NO: 2263 - DNA, 201 bp, Homo sapiens
tcctacttcatgcatacacaacaattaacttaggagaggtcacacaccttcacatagaagctaacaccataaagctttttagaggagagtatctaagtaawgggagtaggaaaatttcttagaggagacacagaaatgataaaaataaaagagaagatgataaactagatttcatcataattaagaagacatcagtaagaa

SEQ ID NO: 2264 - DNA, 201 bp, Homo sapiens
ggagacgcagaggcaaaccatatcggctatgtattcaacatatatttatttcttcagagccaacaaagtgccaggtcttgttctaggcacagacaacaccrtatggaataagaactatgtcctctactattatagcttcacattctagtgagaagcaataattaataataaataatacacaatattggataatttccatca

SEQ ID NO: 2265 - DNA, 201 bp, Homo sapiens
gtgaatgctgagcagaagttagcccgtggccaggggaggtcagaggctggagtaagaggtgggcgctgcaggaaccgagtaaggaaggactcgtgcattasaggaagggggagaaatgctctgcccatgggatgtggtgaagggtgagcggagatggagtaaagaactgcatctggccgggtgcagcggctcaggcctata

SEQ ID NO: 2266 - DNA, 201 bp, Homo sapiens
gccctcaatgtggacctgacagagttccagaccaacctggtgtcctacctcacatccacttccccctggccacctatgcaccagtcatctctgcagaaaargtataccacgagcagctgttggtggcagagattaccaatgcctgctttgagcctgccaaccagatggtgaagtgtgatccccggcacggcaagtacatgg

SEQ ID NO: 2267 - DNA, 201 bp, Homo sapiens
ggcttggaagtccccttccacgctttactgtgctcctgagcagccggggggtagcgactcagcactgagggctgctccctagacttcttcccttcgctctkggaggagccgggtacaaaccggtcttcagttttctttgtctcctgagtcccactgtctgtactcacccccatgtgagaagcttttgctgccctcctgttg

SEQ ID NO: 2268 - DNA, 201 bp, Homo sapiens
gtcttaacctgtgttgggcgttgcaccgggcgacctcagtttcttcctgtacaaggaaaagtactgaccaaaatgagttctacatacatttccgctgctgsagatttctttggtttttgagacagagtcttgctctgttactcaggctggagtgctgtggtgcaatctcggctcactgcaacctccgcgtcccggttcaag

SEQ ID NO: 2269 - DNA, 201 bp, Homo sapiens
atgggcttaaagaatgtgaacgatgtgctcacagaggccacagaagagaaattatagccaggagaacaacctgaaagacaaaggacacggtggcataagcrcatgtaacacaatgtactcaggaaatggctggcatcctgagatatggagtggaatacagtacagggctttgtaaactcagcttggagtcagatcacagaa

SEQ ID NO: 2270 - DNA, 201 bp, Homo sapiens
ctcctcagaagttgcctgcccaggggctctttaaaacagactaggtggatttccatgtctgcccctgcttgttctttttgcctcgccagttgtcttgctcygatttcttcccaagtgggctttcatgatgtattcatgatgagccttcatgacgtactctacaagactagccttttagcaagaacttttatatctctgtta

SEQ ID NO: 2271 - DNA, 201 bp, Homo sapiens
tcagtgggaaaacaatatctttggaaaaacaataatcccccctatcccaacccaagcaaatggctgggctattcttgtctatatttctgacctaccacccracaagggcagatactcactttgttaaagtgctgctcacagcagaagaaaggcatgtagtcacagaaaaggctagggaagaagcaaatcggctccatctgg

SEQ ID NO: 2272 - DNA, 201 bp, Homo sapiens
tggctagataggacaatatgctctgggattctcacaggtccagggccatttggcaaaaaccaacggacaacctggaaatttcccaaatgtgttgcatcaayggaccaagtcagttttccactggtatgaccatcccctctccatttttgttccccaagttagtttaaaaaatgttatctgacatgttgagatcctaacaaa

SEQ ID NO: 2273 - DNA, 201 bp, Homo sapiens
aatcttttcttctacttctcacttcttaaccaatatagaagacaaaaataacattttaattttatatatttctcattcaaattaaaaaagaaagatgagcyagttcagttcatattttgcactaaaactaatttaacattccaaagttaaattatttgtgatcaacaaaaggaaaaacatcttaccctattagcaccatct

SEQ ID NO: 2274 - DNA, 201 bp, Homo sapiens
tattatcccaagggcctgggtagtcaggaaatcacagaattttaaagctgcaaggaacttatgcaaatagtaaaatttttttaaataacattaattgaggkctaatattatgggcatgatcatattgcaaacattttacttgtaatattttctttaatcctcaaaactaccctatgaaattgacactattattagtagtag

SEQ ID NO: 2275 - DNA, 201 bp, Homo sapiens
aaacttaaatgtgtgcggcaggaggaaagtaaacaaaaaccaagctgactaaccaccttattacaaggccaccatgacaagactagagcgtccatcatcarcttttagtgcctcaatgttaagtatggacaaatgagcagtaaacatggtcatgaggtatttcaagaacacttctaagagcagagacagaggtataaacaa

SEQ ID NO: 2276 - DNA, 201 bp, Homo sapiens
gataggccggctcggggtggccatctgtttccgggtcctggtaggaggggtgcttccgcccatggtcccgcccattcttccgcctccccaacctgggtccygtcaacggacgcgaaggagaacaggggctgtatatcacttccggcgaaggaaatggaagaatctatgggctgggaccggaagctggggtctggttttgag

SEQ ID NO: 2277 - DNA, 201 bp, Homo sapiens
aaaaaaaaaaaaaacaaaaaacaactattatcccaagggcctgggtagtcaggaaatcacagaattttaaagctgcaaggaacttatgcaaatagtaaaawttttttaaataacattaattgagggctaatattatgggcatgatcatattgcaaacattttacttgtaatattttctttaatcctcaaaactaccctatg

SEQ ID NO: 2278 - DNA, 201 bp, Homo sapiens
tgtgctaacacgaggaaatgtaaggctatggcctggcattaatataacccttcacaacccaggtcacagaaaatcttttactatatatcagactgttcaaygaacttttgaatacactgctcctcctctcctgaaggaatttcccttggcagccccccaaattttggctattaatagccactatactgaggaaggttttta

SEQ ID NO: 2279 - DNA, 201 bp, Homo sapiens
tgaaactccctctcaaaaaaaaataaataaataaaaattaaaattaaaaaaaatatatatatatatatatacatatatatatgaaggacattctatttctrggagacactggaacagggccctggctggtctggttagtctctctctatcacaggatgctacattcccagcacattctacagttatcctagagaaccacaa

SEQ ID NO: 2280 - DNA, 201 bp, Homo sapiens
atgcgatgattgacatgcttcttataatgtagatttgaaggggaaaagtggcaatgaaatgcccaggtttgggaaacttaaagattagactgaacatctcyaggtttttctactataaatccaagttctggagattcgattgcatctgctcctaatccagggagatctctgccgtagctttctccacagctccgccccttt

SEQ ID NO: 2281 - DNA, 201 bp, Homo sapiens
tgggatatttttagcataggctggatgacacctccatggcaggtacgtcagccacctctgctttagtcaccagcatagggctgtgcttagcagagagcctrgcatagagaggatgcttattaaatattgggtaaaagaataaaatgataaataagggccactataaaatgaatgttacacaaaaacgtgttttccccaaca

SEQ ID NO: 2282 - DNA, 201 bp, Homo sapiens
tctcagagttacgatcccatgggtcaagcaggtattaggcccaaatgaaattttaattacaaaacatatatgcaatatagagtccgggtgcagggtgacarggcgctataagaaagaactaactagggactcaatccatatcacagagcatagaagtctcctctggcaagacaggacttaagctgagaggtcaaagataag

SEQ ID NO: 2283 - DNA, 201 bp, Homo sapiens
aagaaatggaaagtattttaattgatcaggagttcaagactagcctggctgatacaacaagaccctgtctctgaaaaaacaaagaaggacgaagtagaaartatatttctgagaagatacaggttatagagatcctcagttcacaaagcaatggatatttacttttccactatacagccctatcagccgaccacaacgctg

SEQ ID NO: 2284 - DNA, 201 bp, Homo sapiens
attatttaaccttaagaaggaaggaaatcctggcacatgtcgcaacatggatgaattttgtggacagtgtgcatggtgaagtaagccagacacagaaggamaaatcctgtatgattccaatcataatgaagtacctggagaagtcaaactcgcagagacagaaagtagaatggtggttgccagaggctagggtgaggtggc

SEQ ID NO: 2285 - DNA, 201 bp, Homo sapiens
cttctttccacccaatctgtgcttctgtcctcctcctccgcctgacagttttacgccctgaacatctatataatttattgttactgttactccattggatrtaatgaggctctcatcactcacttgccacctgagctattgcagtttcctcctgacactcattccacctcctgccttccttcattccactcactcccccac

SEQ ID NO: 2286 - DNA, 201 bp, Homo sapiens
ttcctttccattttcttagaaaatcttttgtagactttctgtatttcttaacattcagcaattgttatagttcgcagagtgctttatggattacagaatgrtttcatttagcttttcctttaaaaattgacatgctcatatggcagatattattattctcatttctaggggaggagaggaagacctaggaaatatagtaac

SEQ ID NO: 2287 - DNA, 201 bp, Homo sapiens
aaccataaatcccatatttctgatcattcccagttttgagtattctgtctctttgtcaagtcacatgtcccaattttagggctagaaaacatggtcatcaygttgattagaaatgcaatttacagaagatttccctttccgtctgcttctaagactatgcaagagtctcctttcacctcccacactcagcttctgctctca

SEQ ID NO: 2288 - DNA, 201 bp, Homo sapiens
cttgataaacatgccttttaatttatcttacacaaggtgctgagatttttcttttaatgataaaacagggttggctctgaaataccaactgtccacaaacyggtttcaaatggcatgatgtaactaggctttttgccatgggtctctgtgaactctcgcccaggaaatgcaggttttgatatgtacaaattgccaaaggaa

SEQ ID NO: 2289 - DNA, 201 bp, Homo sapiens
ggctttctagatctgagtttacatttccctgtgcagaataccttgacaaatggcagctttctgtgactgatgacagtgcctggtttgtatgagatgtgacytccttctctcaggactgtcatccatctctaatgtcatactgctcatcaaagcaaaccatacagactttctttggaaaacactgaaattggcatgcattta

SEQ ID NO: 2290 - DNA, 201 bp, Homo sapiens
cacataataaacacacaccttggtaaaccacttggaggaaggggccccaagatcatgaggaaatgagctgactcagaagcagctgaacagcaatgcttgcrggattaggaggcatttgtcagaggggcagctacgaagggggcagtggagggaaaaaaggatggatcccctgatatactgaagaaatcttgcaaaggacag

SEQ ID NO: 2291 - DNA, 201 bp, Homo sapiens
tgtctcagggaacggcagatgtctgaagccaggcaaggaacacagttggtgtaattcacatatgggatattcttagcattgaatactgttttctttcagtygcttagggtatagtatggttctttgtcaaaagatgacaaagcgctgccttggttattcagtttgtgaaatgaatcacaatgctttaatagaatgaaatct

SEQ ID NO: 2292 - DNA, 201 bp, Homo sapiens
tcagaatttaacattatccaaattcccttccagacttttctcaggtgcgtggtttcagagtaggactcgtttcttatatacaatgcggtgtttgatttttwaaaaaaaaaaaacttcccttggaaaatactaaaactattatgcattgagtcatttaatattcagaataacctcacaaagcaggtgttaacaacttccatt

SEQ ID NO: 2293 - DNA, 201 bp, Homo sapiens
agtacatccacacattttacatttcatgccagggttcgtgctgtttcaaactcaataccaaccaggctgaaatcatcctccttactctgggcttctgctcrtcctctaacacagcaaaggctgcatccctagactgtgattcatatttaaatgtctttttctcctctgctgggcagtgtgagcctcaggggcagaaccata

SEQ ID NO: 2294 - DNA, 201 bp, Homo sapiens
taagcgatatttcttcaatatttcccttcttggacttcacattgatgatagtttttaggttgtaataatttagagtttggatggtctacatttaccatctrcagttgtttactccctctttttttaatgcacaagtgatgaaaatgttgtcatgtaatatctaaacaatgataaatacttagactatatataaaaatatat

SEQ ID NO: 2295 - DNA, 201 bp, Homo sapiens
tcccttttgaaatacattatattgaactgactgaaaaagggagaaaaacatgtttcagtggttgaagaacatggtagatgaagtagttcattttgaatggytttagttccttaacaaaaaagtcagtggtgaagttgcatattttagtataatatttaggagctgcagttggggaatttgaaatggcttttgtgaattatt

SEQ ID NO: 2296 - DNA, 201 bp, Homo sapiens
ttcactacacttatttaaagttatatttagtaaaaactctaagtaaaacatatcaattccaacagtgtattaaataataaatacatctatgaataattagratttgtactttgaatactagcttataagtcaagatgcttttgggtgcaaaaataaataaaaccaaaaccagctccaacttcagctggcttaaacaccaca

SEQ ID NO: 2297 - DNA, 201 bp, Homo sapiens
aaaattgtttttaacagtaactgataatatatggtttgaccaccacttaattaaccatttcttttttttttgtacatttagaatgttttcctccagttcasatatagacagttaataggaaacagttatattatttaatgctcaactttgttccttagctgtgcctttaattctaagagtagttgctagctaggtatttta

SEQ ID NO: 2298 - DNA, 201 bp, Homo sapiens
aaaatacattacgcttaaactcagaactgaattagacttccagttgtagtgctaacttgataggtagcttgcacaagttatttaacatttttaggttccayttttccagtgaagcttttataaacctgctcatgtatgcatgctttgtctttcagaagtggaataatgtttgcaaagtttttttgtgtgttttgtttttct

SEQ ID NO: 2299 - DNA, 201 bp, Homo sapiens
ggatttaattggtaaataagagacagtgttcttaaactcttaagacttggacaatttctgaggaatagtgggacagaagtcagattgcagttgatttagcrttagttgatttaactcccagccctctgtgcatctggagacaaaagagatgctgggtacaaatccaaagtattaggatagattttactttattttatgtaa

SEQ ID NO: 2300 - DNA, 201 bp, Homo sapiens
ccttaagctttgtgttggaaatatttagttcttagaattcacgttataggtttggattttataattgataagcctacctgactacttactttatagtcctyattttgaataattattataagagctttctgtcctggaataattatggctttcatttattgaaacaagtagtcaataattgcctagcactaatgtttaaat

SEQ ID NO: 2301 - DNA, 201 bp, Homo sapiens
caccatcaccagcgacgtgtgggtgctgcctcaacaggtattgggaacttgctcttgtttacagcttggctcctcatggtagctgtaggaggcaggatctrggtggatgggacctgggattcattcttagaataggtccccaaatggtcatccattttgcttgccgagggctctgtggggcagacgtaggaggcctgaggg

SEQ ID NO: 2302 - DNA, 201 bp, Homo sapiens; identical to SEQ ID NO: 563

SEQ ID NO: 2303 - DNA, 201 bp, Homo sapiens
acttcccattagcagcccatccctgaacctaaccctgcacccagggtgctgtttgttccctgcccaccccttcataccttcactctgtgtgtccttccccrtcctggcacacttccaagtgccttctgtatcctcactatagttcattctgatggatttggtcagggctgggctcacatcaggtgtgaaactcctgctcct

SEQ ID NO: 2304 - DNA, 201 bp, Homo sapiens
gatggctgttacgtattttgtaaatgaagaaacaagaaatgggtggacgcgacttgcagcttagtggcaaagccaggtttgaccaggtctctgggcttccrgtccaccaaacctctagtagtgtttagaaacatttctggaagtctcccaatttttccaaaagtaggaaaaatttattatgtagattgagttgtctttaaa

SEQ ID NO: 2305 - DNA, 201 bp, Homo sapiens
gggaggaaattgaaaatgccctcaggagtcttgagacatcatttgaagtgatatgggagtaatatttttttttaagtctcttgctttatatttagggaaarcttttgttcatttccatatctatttgttttaatgaaagttaaattattttactggttgtctccctaccctcaccctaaattttcaagtaccattgacagc

SEQ ID NO: 2306 - DNA, 201 bp, Homo sapiens
gacttagtaggctgctaccctttggcctggaacaggtaccccagtgtgagaagtaccgtcttccagggtttgtgctgccacaaaagcatctgctgaggctytatagataacacagggggcgaccacattcttgttgactttaccacactttgtgactccctcacttttcatgttccttccccccctcaggttcggatttcc

SEQ ID NO: 2307 - DNA, 201 bp, Homo sapiens
ttgctgactcactgattaactagacttggtttatgttaagcctttgagtcctttgttacagacatcatttgtgcccaagttgctttctcctcctgaaaccycattgctgacctgtaactagtctaatcttgcttgattatacgtttcccccgcccccatccctctgtaaaaccatcttttgtaccaaatgccgttgtatct

SEQ ID NO: 2308 - DNA, 201 bp, Homo sapiens
agagataattgtaaaagcaacaacaacagcaacagcaatcatggctgtatgcttatttgaacaagactagaaatgagagcagaaatttgaaaagttaaagyatttgaatgaccaccagatggcagtgtggggccacctggaagctgaagccaaagtcgtcgttctgtctctctaggcagcctctgaaagtgtcagccccaa

SEQ ID NO: 2309 - DNA, 201 bp, Homo sapiens
agggctatgtcttaagtacttgaaatactctagactctcaataggtggttgttgattgctttttccccagctcaagccttaagtgcagtgccacagttttyagtaattatgtgatcttattttatgtaagtcagttgcctactaaggagtgggtattccttcacccttttcaccagtgaagtggccataacataaaagggt

SEQ ID NO: 2310 - DNA, 201 bp, Homo sapiens
taccactgcagatgaacagtaagatctaattatctcagttataccaattttgtgaaatcctcaatcctgctgttcagaatctattgtattataagaaacargaactgcaaataatgatagccacacaaaatttggctggaaatctgagagttatgcctgtcaatgctttcaggatctgtttcaggactttccagtcctact

SEQ ID NO: 2311 - DNA, 201 bp, Homo sapiens
tatatataacagaaaccttcccggtatatcaggcgtgacacaggtgctcaaagcagatctggcctcaatagtgagtgattatttcccgcaggctggcagtygctctagggctgatattgaatgttactacatgtagaaagctggccacatcatcctaacactggttaacgttcaagaggaggcaggtagacagagtgctat

SEQ ID NO: 2312 - DNA, 201 bp, Homo sapiens
gagcctctttatccctgctctgcccctgtcatagtgggagaatgtgccacaaaggccatattaatgagaggactggaaagaacacaaggagatacaaaacytcaagtcagtgaaaaagttacatgttacatgggattttggtaaattcaatgttctttccctttttccctctagaatcacaatttcaaagatgctttaatt

SEQ ID NO: 2313 - DNA, 201 bp, Homo sapiens
ctacattcacctgtataacctgtctaaaagccagcatactgtttggaagatactattcaataaatgctttgaaaacggaatcactgtcaattcttacttcyagacacaagatagggagcctttatcctactgtttcattaagcttctctgactttaagttttgtttcttttggggcagaggaacaaataaagatggtcaat

SEQ ID NO: 2314 - DNA, 201 bp, Homo sapiens
gtatggacaagtcacttaacatctctcagactcatcttcttcatgtctaatacagcaaccctacaaatcctatataaagcacttgacacgtagaggcactsaatgcacattgtctattattactatttctctcttagatcgcttcagtaaaaacaaagttaattacggctaatatgttgggaagaaatcatttgggttggg

SEQ ID NO: 2315 - DNA, 201 bp, Homo sapiens
gactctgctaacgtatcacagctttgagtggcaaacctaacattttgaacccccttctgtagtattacttactgaaaaaagtagaggaactagtatttctmcaaggtccttttcaagaatcaaaggagatgatgttaataaatgcccttcctaaagtatgttaaatataaggtattaattatggggaatatgacataatag

SEQ ID NO: 2316 - DNA, 201 bp, Homo sapiens
tgaggtatcataccatttacagatgagaaaactgaggctcaatagagtgactctgctaacgtatcacagctttgagtggcaaacctaacattttgaacccycttctgtagtattacttactgaaaaaagtagaggaactagtatttctacaaggtccttttcaagaatcaaaggagatgatgttaataaatgcccttccta

SEQ ID NO: 2317 - DNA, 201 bp, Homo sapiens
gctttctgagcaaggcctactcccccaacccttccccactgcggttaatatcttacaaacttgacagtggaactggggccaaagtgaccattaatttgccrggtagggtgggaatcagaatcctggtttatccgcttcatagatgtgtaatcttggcaggttatttaaactttctaagctactttttgaaacgtaaacaca

SEQ ID NO: 2318 - DNA, 201 bp, Homo sapiens
attgggggattaatcagacataaggaagaaataaaaaacttacaatgaagggaggcaattattaaattgcttctgctcagcagaaaatgttttcttcaggrtctcaaccatgaatacctaaattctgggcagggaaagcaggagtataatagaaatactaatcaaaattcacaggacgttcacactgctttttcttttaaa

SEQ ID NO: 2319 - DNA, 201 bp, Homo sapiens
atctacaaacaaaggtttatttctattacatcaaaactctgagctgctcatagttaatcatgcatgctctaatttaataagtggccttcactgtgttccayggagctttaagagtttcatgtgggatgaataacaggctcaagtatgtaaaattatcagacctgcattcctgtttcaatcagaaaggctcaatttttattt

SEQ ID NO: 2320 - DNA, 201 bp, Homo sapiens
ctattccttgccttattatgccatggaataaaaatactcctactcattttccctctttaaataatgtaaagttatgtatagataattcaacacaaaactayttgccaactcaaaaaagattttacaaaagatataatatcttaatatgtggtgttttattcatatattttgcagagctgctcaattaattgaagtttatat

SEQ ID NO: 2321 - DNA, 201 bp, Homo sapiens
agacataaggaagaaataaaaaacttacaatgaagggaggcaattattaaattgcttctgctcagcagaaaatgttttcttcaggatctcaaccatgaatrcctaaattctgggcagggaaagcaggagtataatagaaatactaatcaaaattcacaggacgttcacactgctttttcttttaaaaaatgttgtatttga

SEQ ID NO: 2322 - DNA, 201 bp, Homo sapiens
ataactgggagttaattacaagggttggagataaaaacagaccttgaggcctattgttggttacttggataatttcccactatggctattctctgggatayggccttttacttagtcaagcataagacacaagcaagaatttccaggtagctgttttctccaagtgctcgatcctagagattagtactgacctagaattta

SEQ ID NO: 2323 - DNA, 201 bp, Homo sapiens
aacacctaactacgctacggtttatagttaaaaggaaggtggaagatcctgagtcattacagcaatcacaaaacatgatggatttcttcatttaaaaacamaaaagaggtcttggcatagttttcaagggcaaagcatgacaagactctccagtgctttctttcatccccctctgtgtgcctttttctgcctgactcacag

SEQ ID NO: 2324 - DNA, 201 bp, Homo sapiens
ttctttgtttcttaaatgcttgacccagaattttgcatgtagtcatcaagacatcgccccacagctgagctgtgtcatggaacagccagcccatctaaaargctgcctactcatcagcctgctcagcctgtgtgggctgggaatgtggtgccatgcaggggaggcattccccccgttgcatggtaccacataccctttggg

SEQ ID NO: 2325 - DNA, 201 bp, Homo sapiens
attttaggtagtatcttcccatacaattcatcatatccatctttgccagattaaatttcttaaaaataagcttagtcattactccccatccccatctccarttaataatcattacaaaatgactcacgctgtcttcccaactctatctcatcctactcttctacacatattccttgttgactgtacccatctcctgcactt

SEQ ID NO: 2326 - DNA, 201 bp, Homo sapiens
atcacaaaacatgatggatttcttcatttaaaaacacaaaagaggtcttggcatagttttcaagggcaaagcatgacaagactctccagtgctttctttcrtccccctctgtgtgcctttttctgcctgactcacagcctggctcaatcctaatctttctactgcaaagatgcagcatttaaagcaatttttcctgtgcag

SEQ ID NO: 2327 - DNA, 201 bp, Homo sapiens
taagttttggggttagatgttggtttaactctaagctctggaacactactagtgatggtatggacaagtcacttaacatctctcagactcatcttcttcaygtctaatacagcaaccctacaaatcctatataaagcacttgacacgtagaggcactcaatgcacattgtctattattactatttctctcttagatcgctt

SEQ ID NO: 2328 - DNA, 201 bp, Homo sapiens
agaaatgatggaattcaataaaaaataattataatcataaactgttaattttagaaaaaaacattgaaattgagaccaagaaatgtaaatcagcttaccaraataacctagagagttagcagcaaattctaaatagtctttggtcatgcaaacttacaattcaatactattcctccatgccatgtaacctcttaagtgctt

SEQ ID NO: 2329 - DNA, 201 bp, Homo sapiens
ccttcctaaagtatgttaaatataaggtattaattatggggaatatgacataataggtaaaacaaatagatatcataccatttctatcatttaagcacaayagtaccttgaataaggcatccagtggactagagatcaacaggcattttaatcttaatattttacactgatgtgcttttttttttctgagacagtctctct

SEQ ID NO: 2330 - DNA, 201 bp, Homo sapiens
ttaaaaatgacaactccaattttgtaggctgcatttaaaaatacagtaagaataaggctgggcaaggtggctcatgcctgtaatcccaataatttgggagrcaaaggtaggaggatcgcttgaggtcaggagttcaagaccagcctggacaacatagtgagaccccatctctacaaaataacaattcactgggtgtgttgg

SEQ ID NO: 2331 - DNA, 201 bp, Homo sapiens; identical to SEQ ID NO: 2308

SEQ ID NO: 2332 - DNA, 201 bp, Homo sapiens; identical to SEQ ID NO: 2309

SEQ ID NO: 2333 - DNA, 201 bp, Homo sapiens; identical to SEQ ID NO: 2310

SEQ ID NO: 2334 - DNA, 201 bp, Homo sapiens; identical to SEQ ID NO: 2311

SEQ ID NO: 2335 - DNA, 201 bp, Homo sapiens; identical to SEQ ID NO: 2312

SEQ ID NO: 2336 - DNA, 201 bp, Homo sapiens; identical to SEQ ID NO: 1158

SEQ ID NO: 2337 - DNA, 201 bp, Homo sapiens; identical to SEQ ID NO: 1159

SEQ ID NO: 2338 - DNA, 201 bp, Homo sapiens; identical to SEQ ID NO: 1185

SEQ ID NO: 2339 - DNA, 201 bp, Homo sapiens; identical to SEQ ID NO: 1186

SEQ ID NO: 2340 - DNA, 201 bp, Homo sapiens; identical to SEQ ID NO: 1198

SEQ ID NO: 2341 - DNA, 201 bp, Homo sapiens; identical to SEQ ID NO: 1199

SEQ ID NO: 2342 - DNA, 201 bp, Homo sapiens; identical to SEQ ID NO: 1204

SEQ ID NO: 2343 - DNA, 201 bp, Homo sapiens; identical to SEQ ID NO: 1205

SEQ ID NO: 2344 - DNA, 201 bp, Homo sapiens; identical to SEQ ID NO: 1208

SEQ ID NO: 2345 - DNA, 201 bp, Homo sapiens
agatcaatgtggctcagagtgtggtttccagagtacggtcctcaaactgttactggtctgggatgaggcaagaactgaaattgagtcagaaattttcaaarcaatcaaacactgcttcctcctttttattgtactccacaaaaccattagtctacaatagattggaaattttaaaagaattaaaatcaagtctggttctcc

SEQ ID NO: 2346 - DNA, 201 bp, Homo sapiens; identical to SEQ ID NO: 1220

SEQ ID NO: 2347 - DNA, 201 bp, Homo sapiens; identical to SEQ ID NO: 1221

SEQ ID NO: 2348 - DNA, 201 bp, Homo sapiens; identical to SEQ ID NO: 1223

SEQ ID NO: 2349 - DNA, 201 bp, Homo sapiens
ggtgtgccttcttccactgcactttctggccatttctaagttttctgcactaagcatgtgttagttgtgtaaaaggaaatgcaaacagtaacaggctcagytggggtttttcgtcttcccctttttgttacctcccctagtaacccttgcaaacagagttagactcctctatctctttctctgtcatacctttttgacttc

SEQ ID NO: 2350 - DNA, 201 bp, Homo sapiens
aaagaattaaaatcaagtctggttctcctcactgagctcattggggaatccctggcctagggatttccctcttctcccgcccccaggcctcggaaaatgarctggtgtcagctgctgcccagaaggttacccagcgtgttctctctctcagggtccttcccttaaattctcaagtttgacatggaatagaagaatgtcggg

SEQ ID NO: 2351 - DNA, 201 bp, Homo sapiens; identical to SEQ ID NO: 1224

SEQ ID NO: 2352 - DNA, 201 bp, Homo sapiens; identical to SEQ ID NO: 1281

SEQ ID NO: 2353 - DNA, 201 bp, Homo sapiens
atgcagcagtttctgcaataaatctaatttggtgctgtcaaaaaattagacttatttgatatagcagcacattagtaaatgattgtggcagatttaaagtygtcatttagtctcttcttactcttaacagaatctcgcaaattcattttcccccttgatcaactctatgaaaatatcccagttctttgtcctgcagccctg

SEQ ID NO: 2354 - DNA, 201 bp, Homo sapiens
ctgttctagagaaagaaaatctataaaatggaagttcctgagataagaaagcatagtactggaggaagagcaagaactgtgtgtccaacataaaggaaaamagaaagtgtggcatacaatgaggttggagaggtaggaaagggctggacctaaaggcagggtctttatgtttttgtttttattttattttatttatttatt

SEQ ID NO: 2355 - DNA, 201 bp, Homo sapiens; identical to SEQ ID NO: 1312

SEQ ID NO: 2356 - DNA, 201 bp, Homo sapiens
ttctacatgtttgttgaggggcttcctgcattgttttcatttattgtttttgtctgaatatagtaggctatgtctgtgtcaagaattagcctgtagcatakactttaggttgtctccagtgttttccaagcctgcactttttgctaagtgttcatagtcattttctaattttccccattcatgcggttgctttggaatatc

SEQ ID NO: 2357 - DNA, 201 bp, Homo sapiens
attattccagaagcatatgccaagaggacaataagaaaacttctgaaaagagaagatgcaaaagagcattacaatgcatagttatgcattcaacaatgtayaattcatagttctatgaaaattataatttatttaataagaaaatactataaaaattaagaaattacagagaagataagctattttaattatgacattcta

SEQ ID NO: 2358 - DNA, 201 bp, Homo sapiens
tttgtttatagacagctatataagtgctttagttttctgtgcttttgaagaattatggttagtttaccaccagaaaaatggtgggttcaatgtagatgggyctttcttcaacccatctaagcaggtttcatgaagcacaaggagatataaccaattcttacttgtaatagggaagcagggtgaccatgaatgatgcttagt

SEQ ID NO: 2359 - DNA, 201 bp, Homo sapiens
aaaaggaaatcattagaataaaatgcaaattttgtttatagacagctatataagtgctttagttttctgtgcttttgaagaattatggttagtttaccacyagaaaaatggtgggttcaatgtagatgggtctttcttcaacccatctaagcaggtttcatgaagcacaaggagatataaccaattcttacttgtaatagg

SEQ ID NO: 2360 - DNA, 201 bp, Homo sapiens
gttactgccctgaaagaataattatttatgggcttgaaattaaggggagagaccaagacttattacttatctgtatactcctgttgtctatcaagtctacracacaatgctcaataaatgctggctaaacaaatcacagaaaacaaacctgcatgctggacattttgatttgcttgcagctgaggggctcctgaattccca

SEQ ID NO: 2361 - DNA, 201 bp, Homo sapiens
actcatgaggctgaggtgaaacaatcccttgagcctgaggggagtgaggggaagggtggaggttgtggtgagctgaaattgtgctactgcactattgctgytctgagcaacagagtgagactctgtctcaaaaaaattaaaaatgactataaatactcggtaaatgtcaaagtgttatagtcacacacagcataacaataa

SEQ ID NO: 2362 - DNA, 201 bp, Homo sapiens
gtcagtctatgaaaaattgctggctttccctccagaaaaaataatttttaaagaaacttctttggttggtaggctatttattactgcctcaatttcagaayttgttaattggtatactcagagatttaattttttcctggttcagtcttcctggttcagctgagagtgtatgtgtccaggaatttatccatttcttctaga

SEQ ID NO: 2363 - DNA, 201 bp, Homo sapiens
gcaatctagatcttagagaagtggcctttgtaattctggatatacagagcaaaatctgctggtactattcgataaaataaatgcttgtgaataccttctaygtatgaagcaacataccaagatgatgaattctgtcttaaaaagagcttggtcagtagtggacattaagagcgaagtgtaaaacatggagaccagtattta

SEQ ID NO: 2364 - DNA, 201 bp, Homo sapiens
gcattataaaactataaaagtcaatgatttctgaacttattcccctttaatactttaaccaaacttaacaagtaccatgcttactattttattaactaggwttatcaaaattgataactaaaagggccttttcttcaatgagaccctgttctttttattttgctctattgcataatcttaatttttcagcaactgagaagt

SEQ ID NO: 2365 - DNA, 201 bp, Homo sapiens
gtgtgaactttttttgtaaaagtcagatttttgtctcattccttagtgatttacaattaaagttggagtcacattactaaattaactccaggagggatggraattcagaaactagttgcactatctcagtccaaactgcttcaatgagaaagggtaagaggattagtcatgtggtccttaagcaaccagaaacatgaagtt

SEQ ID NO: 2366 - DNA, 201 bp, Homo sapiens
taccgagagaataaaatatttattaaataattattcccataggttgatgctagtaaagaatttaactgagaaagagctatcagaaaaattagataattaastttgaattcaggaaaatataggttatcattaataatacaccatgattagcttttaaagcataagattcaagaagaggcaagtgagcatgatataatacag

SEQ ID NO: 2367 - DNA, 201 bp, Homo sapiens
ttgtacttttcttttctatctttagtttccctttgccctgattttgttcacccacttttaggtagtgttttgtctcattatactctgtacagtttcataarccacaaaaatccactttaaaagcctcccagcaaatggaaatttagaacctgaagcagatcgtcagcacatccagacctataacaatttgctccttgtaag

SEQ ID NO: 2368 - DNA, 201 bp, Homo sapiens
tgcctttaggggccaggcaggtagtagagaatagaagtggactggtataagacagcaggagtcctgtcaacagtgccaaactgcagagcagatgccctatwtaaaggcatttaaactcggacttttgtttaagacactgcatagcaactcaaaaccattataggccaaattcagcctgcaggcccccagtttgcagaaaga

SEQ ID NO: 2369 - DNA, 201 bp, Homo sapiens
ataaaatatgtaatgccctctagaagggaaccatcctggaagataaagattatggcatggatatgccacagtcacatcttgacatctcagtctaaaatcckagataaactctgcaacaacatgttttactctcttgtggaaactgaattttgtatatttccctccctgcttagcaaagcagtaaattatgcatttgtgttt

SEQ ID NO: 2370 - DNA, 201 bp, Homo sapiens
tttgggtcagatcctgcctggctttctccttcttttgctttcagggtcaaacaactgttctttagaagacagctgcaaggactattattaatattaatatsaatggtaacaacagctcccatatattgaacatttactatttcctcattatgcagaacatgttatctcactcagctttgaaaacaaccataaaaggtagaa

SEQ ID NO: 2371 - DNA, 201 bp, Homo sapiens
acagaccataacctgactgtcaactatccctacccttccactgttcactcctgccagaggaccctttgctagtagcaccgtggttgggaactgggacacascattcactcccatagctttatgtataacagccgcccgacacccaaccataagccaaggtaagtcaaggagaggtgaggctggagctggggtggaattaca

SEQ ID NO: 2372 - DNA, 201 bp, Homo sapiens
actctagcagtgtagtcaaatcatttatatccatgtcttagaaccaactgggtggtaaagaactgggtcaataatagtcttttaagtgactgtccaactaygtcactgggggaacatttaaatttataacctaataaagggatttgtttttcagcctggttgcctcattttgaccttaagcaaatttgaccaaatctacag

SEQ ID NO: 2373 - DNA, 201 bp, Homo sapiens
gatcccctccctccggctccagactccgcccccagggactaacagaataacatcctcctaatccctgatttgtgtgcagcgccttagctgatgtcactccyagacccaaaatgaagggtcttagaccccagtgcatggaaggggcaacaggcccagagaggaggattagctctctcgaggtcacataaccaattagagtca

SEQ ID NO: 2374 - DNA, 201 bp, Homo sapiens
tctttgcaacctgagaaggagtcagacggcgctgctgggcctaggttgagggggtcgtcaggagttcagggctgcatgggactccaggtggttgggacagyaccagatggtggtgggatcccctccctccggctccagactccgcccccagggactaacagaataacatcctcctaatccctgatttgtgtgcagcgcctt

SEQ ID NO: 2375 - DNA, 201 bp, Homo sapiens
tactaaaaatacaaaaaatttagctgggcaaggtggcgggcacctgtaatcccagctacttgggaggctgagacaggagagtcacttcgacccgaggatcrgcggttgcagtgagccgagattgcaccactgcactccagcctgggcgacagagcaagactgtctcaaaaaaaaagaaaaaagaaaaagaaaaaaatggga

SEQ ID NO: 2376 - DNA, 201 bp, Homo sapiens
gatcggcggttgcagtgagccgagattgcaccactgcactccagcctgggcgacagagcaagactgtctcaaaaaaaaagaaaaaagaaaaagaaaaaaaygggagtgggattctaaaagaatgcaaaaataaaccctggggctgatagctttctggaccagtgaaaggggtagggtctcctttgggggaggggatcatga

SEQ ID NO: 2377 - DNA, 201 bp, Homo sapiens
attttggtcaacgttggactgcatataccacagtggtcccctacgattatagtggagctgaaaaattcctcttgcctactgatgttgtagccatcataacrtcgtggcttaatttgttatcttttctatgtttccatatgtttagatacacaaatacttaccactgtgttacaattgcctgtagtatccagtatagtaaca

SEQ ID NO: 2378 - DNA, 201 bp, Homo sapiens
ggctcaactttcctgctgccttctacgccaactaccatttcactttattcaccgttttggatttgaagctgctgcttgatactgacattttgtagatgtartatggctatgccggtacgtttctgcctattgaagaagatcatgttcttttagtattaaacagtacagttgacttccaatcaattagtttatatataggaa

SEQ ID NO: 2379 - DNA, 201 bp, Homo sapiens
tggctatgccggtacgtttctgcctattgaagaagatcatgttcttttagtattaaacagtacagttgacttccaatcaattagtttatatataggaatcytgtgtagcctgcagtggggttgtggggagcaaggcagaagcagccactccagagaggatttacatttatttcttccaggcatctgagagatcatttcaga

SEQ ID NO: 2380 - DNA, 201 bp, Homo sapiens
gggttgtatctccagaagccccatcgatgtcaggttgggcagagccagcccaggaaacatggaacatctgcctctggcctctcacctctttgttctcctaygaagcccggcttttttttctttttttgagacggagtctgctctgtcacccaggctggagtgcagtggcgcggtctcagctcactgcaagctccgcctccc

SEQ ID NO: 2381 - DNA, 201 bp, Homo sapiens
acctcagtttcctcacctataaaatgaggggtttggatgagttgaggtctgaagcctcctccagcccaggtaataaatctttgtagtggacaggaggaatrggtcctaggggtttcaggaggggacttccatgggtacctctgactctacagagaaatggaagactgagatctgacttagcagcctagaaagacttagcag

SEQ ID NO: 2382 - DNA, 201 bp, Homo sapiens
cgagcgctctgagtatccttggacatggcaactccaagcctcagtttacccatctgaaatatggggaaaatcatagtgcttgtgaagagcaaatggaggtrggcttggaaagcacttgtcaccgtgcctgacacatactgtctaataataagcttaatgggatatagataaaagctttcattattatttgcctctaaatcc

SEQ ID NO: 2383 - DNA, 201 bp, Homo sapiens
cagctccgggaaagactccttccctctgcttgaggagaggagagggaagagtaaaagaggattttgtcttgcaacttggataccagctcagccacagtagsagagggcagagtcctgaagtccccattctagaccctagctcctggatgacatttctagacataccctgggccagaagggaacccactgccttgaaaggaa

SEQ ID NO: 2384 - DNA, 201 bp, Homo sapiens
tatctttttgaataatgtttttcttttgaaccatgtgaatatattacctattgaaaacaaaagttagctataaataaaacctcttaaacgcttagtatcartatttctactcttaccccatctcagatatgcaacaacaaaaatgtctcctgctttttatctccttttttgaagggggctcctctggctacatttccccac

SEQ ID NO: 2385 - DNA, 201 bp, Homo sapiens
ctcacactaatgaggagtgtgttacaagaacacaggagccagttttaagggttttccactgggcaaatttgagacaatttgagtaccaaaagagaataatkactaaaattgatatcatgaataagaatccatgaatctccagcaataactcagagagtgaaaaactttaaaaaaaaacacttcttcccatcattggaggta

SEQ ID NO: 2386 - DNA, 201 bp, Homo sapiens
accctatgagattactattatccttaaagactgaggcgcaatgaggttttatttgtccaaggtcacacaatcagcaagcagcagtgcttaataaggacctsagacagactccaccaaaaagagctcacaatttgaaagcaagccccattcaataaatgatgctgggatcactggttatacatagggaaaaaaaatgaaact

SEQ ID NO: 2387 - DNA, 201 bp, Homo sapiens
atcctcacaaaaccctatgagattactattatccttaaagactgaggcgcaatgaggttttatttgtccaaggtcacacaatcagcaagcagcagtgcttmataaggacctgagacagactccaccaaaaagagctcacaatttgaaagcaagccccattcaataaatgatgctgggatcactggttatacatagggaaaa

SEQ ID NO: 2388 - DNA, 201 bp, Homo sapiens
tttttttaagttttatttattttaggttttatctattattgttactattgttcatctccatttccacccttaattccaacaacacccttataacaatcctsttctccaagcaaagtggactctttaccatctcctaaatacccacctctgtgtttatgctttcactcagcctggaaaatacagcactgtctcatctccaag

SEQ ID NO: 2389 - DNA, 201 bp, Homo sapiens
cacatattataaacatattataaaccgtaagtcagaggctcagtgagatttttcccacgttgttacataaaaaaaacaaagaaataaatctgtgcccaaaytgcaacaaagagaaaaaaaattacaaatgaataatacaaaaacagaaataaaatctagaagaggtcaggcgtggtagctcacgcctgtaatcccagcacc

SEQ ID NO: 2390 - DNA, 201 bp, Homo sapiens
ctcacccaatctagtgagaagtaagagagtaaactagctccatatctctcctttctccccatgctgatcctacacttcacaatcaggcttcctttcctaaygtacagctttcatcacatcactggcgaaaaacatttgatgacttcccactacctagtcaatcaagttcaaacttcccagcttggaatagaaatgggtatt

SEQ ID NO: 2391 - DNA, 201 bp, Homo sapiens
agcccacaaaactgaagaactgctattatactagaagaaaaaatttatgaaattcaattttaactagtagctagtggcactataaactggtagttgttctraagaataatctgacaatgtggctaaaaagtgatagcctcagacctaatgaaatcattttagggaatatattctaagaaaaaaactggaagaaaaaagatt

SEQ ID NO: 2392 - DNA, 201 bp, Homo sapiens
tatagttaatttattaactgataatgaatattataactgacatagaatacacaattcatcacaaagtaaaggtatggtcctggccttctgctttatagagwttgtatatcaaataaagcatatgaccaactctagggctgcattcctccttccatcaaagccatagtatttcatttgtgtatacatctaaatgtaactcta

SEQ ID NO: 2393 - DNA, 201 bp, Homo sapiens
caccaattactccagcctcctggtgttcatgcctttgtgtaatctcttcctcctgagtatggactggcctggtgatttgcttctaactaacggactatggwaaatgtgataggatgccactccatgattataaaaaattgtgatttccatcttcctaggagacttgctattcctttctcagctttgtgatgttgaagaagc

SEQ ID NO: 2394 - DNA, 201 bp, Homo sapiens
gtgctggctttaggtctgacccagtgtagtttcagtggtggggtggccacaggggtgcttgtgtaacctctcccctagctccaggtagctcagcatagacrgacaaattccagttgtttgggagagagtaagaggagagaacaagagtctctccctggtaatccagagaattattctggattttacctaaaaccaccaagg

SEQ ID NO: 2395 - DNA, 201 bp, Homo sapiens
tctgctgacacctctgatttccttaaccaaaaactacaccacacttgacagctttgcaatggtttccaaaactctattactctgccaaaaaaaccttttcrcccttattatcaatgagaattctcccctcattttcctttcacttttttttttttttttgagacggagtcacgctctgttgcctgggctggagtgcagtgg

SEQ ID NO: 2396 - DNA, 201 bp, Homo sapiens
ctatttctactattccagctcctcttacctaagaaaaaaaatcacatattaataaacagaatttccacactatactgctatcattcccctatttaccaacwgcatatatgctaatttgtgtcaaagagaacactaccggctcccaaacttgccaattaggggtccacaaactacgtcctgtgggccaaatgcagcccactg

SEQ ID NO: 2397 - DNA, 201 bp, Homo sapiens
aattattctttaatttggctccaagagctttaatactgaaaaaccaaaagagctacagtactcatttctgatttaaaaggtaactgtgatactacaatatrtattttttggtttttgtcccacgttcctggctcacagctcctataactcttgtaatttcctaagtgagccatcttttgttaaaatatttggccttttgcc

SEQ ID NO: 2398 - DNA, 201 bp, Homo sapiens
ccatatactcagcaggctgaggaacaaagaattgctcgggcccaggaggcagaggttgcagtgagccgagattgcacttgggtaacacagcaagactcttyctcaaaaaaaaaaaaaaaaaaaaaaaaaaaaatcggccgggcgcggtggctcacacctgtaatcccagcactttgggaggccgaggcaggcggatcacga

SEQ ID NO: 2399 - DNA, 201 bp, Homo sapiens
aggaaacaaatctttttacagagctccacacataaggaagttaaaacattttatttgtactagtgaaaacagaagacctaaatacctaacgatagtagatyagttagctaaatcatggcacatccatatggagtcatgaaaaatcatgttgtagattatttaatgacaaaacgatttatgacacattaccaagtgggaaaa

SEQ ID NO: 2400 - DNA, 201 bp, Homo sapiens
tgccctctgaatttggtgctcattaatattaactgatatagttaatttattaactgataatgaatattataactgacatagaatacacaattcatcacaargtaaaggtatggtcctggccttctgctttatagagattgtatatcaaataaagcatatgaccaactctagggctgcattcctccttccatcaaagccata

SEQ ID NO: 2401 - DNA, 201 bp, Homo sapiens
tcaaggcctcgatattcccttccttcaagaggggccaaactttctgggcttttggtaatggagtcactagctccctgtggctacatatgggttgggatacrtgaattgtgctgggtggacactagttgggggtggccccaccttcttaatccctgtagatctcccacccccatcccaccagagaagccagcatcttaagcc

SEQ ID NO: 2402 - DNA, 201 bp, Homo sapiens
gactccatcttggggaaaaaaaaaattgtaaaatataaataaaaacgaactgaaaatcacccaaatgccaaataaccagagtattttagactttggttgtyatatatccattaaaaatgataaatatacagatgtgtagaaaagtacgtcaatatattgccaaatgaaaaaagactaaaaaaacctttatatgaattaaat

SEQ ID NO: 2403 - DNA, 201 bp, Homo sapiens
tctgcagtagggggcctccctcttcatcttcacccagggaaggattggttaagggcttacctcggtctgggtccaaccctcagtgctcatccttaagggcycctgggaactgacagctccctcccttcatcatcacctcccactgacctgctgtctcactgagcccaagcaacctgatcttcctcctacccctggatgctg

SEQ ID NO: 2404 - DNA, 201 bp, Homo sapiens
gattttgccatgttggccaggctggtatcgaactcctgggcttaagcaatcctcctgccttggcctcccaaagtgctatgattactggcctgcactgccgygcccagctctgctgcctctttttacagcctgccggcccagaccagagtctcagaatactaagcccactttctggggccagggtcagtagatagctttgct

SEQ ID NO: 2405 - DNA, 201 bp, Homo sapiens
cagctctgctgcctctttttacagcctgccggcccagaccagagtctcagaatactaagcccactttctggggccagggtcagtagatagctttgctgctstatgattctaagcaagtatcttgacctgcatgtgtctcagtgcacctcagtttcctcacctataaaatgaggggtttggatgagttgaggtctgaagcct

SEQ ID NO: 2406 - DNA, 201 bp, Homo sapiens
gaagccccctactccttccattccacttcctccctcttattgcaattgtggttaacagttctgttcttgtttattgaccttttctgtatctgtaggtaaaytgcactttttctgtagataaacattttttgtatgcttttaatctttgtataaatggcaccttactatatgcattctttgtcagcttcctttttcacttaa

SEQ ID NO: 2407 - DNA, 201 bp, Homo sapiens
cccaaagtgctgggattacaggcgtgagccaccgcacctggcccttagctctctttaatgaatgcaaacttaacatgggatttaaaagcatattttccaaygtactttcaataaataaaactactgctattgccatttagcccattctctttcctccaagtaaaaaaggagtcatgctttctcttgtgggattaggtcatc

SEQ ID NO: 2408 - DNA, 201 bp, Homo sapiens
atagtacctggcacaccacaggcaatgaacggaaagccgtaagatggagaaaggaccataagaaagaagagagaggttaagtttaaattaatagaataggytcatgcctataatcccagcacttcgggaggccgaggcaggtggatcacgaggtcaggagttcaagaatagcccagccaacataatgaaaccccgtctcta

SEQ ID NO: 2409 - DNA, 201 bp, Homo sapiens
tcatctataagacagaatttactttcctaatagatactgtgaaaattagatgagataacacatctagggcacttgtagctcaatctattaaggatgcatgrcatggaacaacattcaaataaatggtggctattaacctcctcacagggatgatatgaagattaaatgaaaaaaatattgtgaaagtgtcttatgaagttg

SEQ ID NO: 2410 - DNA, 201 bp, Homo sapiens
acagatgcgttttggagtagtagactgatttattagctagttcaacaagtcgcttaacccttgtgtgctgaaaaatgtgctgattataggctaactagggmcagttgaggaaggcttagaaattttttttttgttttggaaacggagtttcgctcttattgcccgggttggagtgcaatggcgcgatctcagctcactgca

SEQ ID NO: 2411 - DNA, 201 bp, Homo sapiens
ggagacggagcttgcagagagccgagatcgcaccactgcactccagcctgggtgacagagcaagactccgtttcaaaaaaaaaaaaaaaaaaaaaaaaaaracaagacaagacttagggcgacacatggtggtgattgttgcacaacattatgagtacatttaatttccactaaactgtatacttaataatggttaacatg

SEQ ID NO: 2412 - DNA, 201 bp, Homo sapiens
gagataaaatgggcagttttttgtgacgagtttgatataagggtgagggagagaggtatcaaggaggacttgtctaatggatagatggtggtgccatttaytgagatggggtacaatggcagaggacctcactgttggaggtgaaaaatcacaagtttggttttagatatgttgagtctgaggttccagtaaggatgtgca

SEQ ID NO: 2413 - DNA, 201 bp, Homo sapiens
accactctcaactctcagcttgtagaggtccctcttgggtcctcctcttgtggccctctccacacatagcatttggtccttcatgggagcaccagctgctsgaaaaaatgattctgttaggtaaaaatactatacatttttgaaacatgcaccaattatttagctctgtgattgtgggcaatttcttcaagcagcctgagc

SEQ ID NO: 2414 - DNA, 201 bp, Homo sapiens
aacagaatgtttcttgcacttaatccaaaattttgactattgttattgtaagagagcaccaccttgtggagagttaaaatatagctagtctgtggctgctragctgaaaggctgcactcacccaagtccttctaaactgtagggttctgattcacagggtctgatggtaaaacagaaagttaatgaggtatggcagtttcc

SEQ ID NO: 2415 - DNA, 201 bp, Homo sapiens
catttggtaggatattgcttcggtagttacaaatattctcctccagattcgatacggtcttgtgctgcttaacaaatcttaaaagcaagacttaaaagaaycaaactgtttctaaaaaactgcattgcagaacacagctcaagaaggcatgcatagaaacaggaaaataagacccaaatgaggagaaaaataaatcaatca

SEQ ID NO: 2416 - DNA, 201 bp, Homo sapiens
ttaaattctatgttttctcatctgcctaatgggaataattattttaaactgcataggagtgttgtgaggattaaatgaaaaatgaatgtgtgacactctaygacgtcttaacttgatttgatttatagtcagacttgagattcacaatagacttcatcaagcaccaattttacttgtcttgaagaaaatgcacaggaccag

SEQ ID NO: 2417 - DNA, 201 bp, Homo sapiens
tctgtgcaccatacttgctcatgtagtcaggactgttgacaaccagaggtgatcacttggtggcttttgcagctctggcaccctttagcctactcttcacrtgttgggaagtgccatgaaggggggttgaaagccactgaaggactttaaataggaaccctggcatgctcagacttggccagaatgagaagggaataaaga

SEQ ID NO: 2418 - DNA, 201 bp, Homo sapiens
ccaggccatctcaccgcttctgggaagagaacccaggcaagtgtggagaggaggagaggagaggtcccaggcaagcaggacaatgaggagccatgatgccyggcctgtgcttctcccagttctctctctgccttcctcaccctggagttaccagaggctgatacacgttgaccacaccagtgctcccttgccctccaacct

SEQ ID NO: 2419 - DNA, 201 bp, Homo sapiens; identical to SEQ ID NO: 2255

SEQ ID NO: 2420 - DNA, 201 bp, Homo sapiens; identical to SEQ ID NO: 2256

SEQ ID NO: 2421 - DNA, 201 bp, Homo sapiens
agatggctggtgctgagggtgacaccttggaaacaccaggaaacaagccatacaccctgacaatgtgtgactgaaagagaatgagcttgagtgtctctgaygtgggtaattcaccgcagcaatcccagaagcagtgaattgtgggcttcctaccctgtgagctacttaagcatcttgaatgctcaagctaaggccagcgag

SEQ ID NO: 2422 - DNA, 201 bp, Homo sapiens
gcctccgtggtctggtcctccgcctgcatctgctatagtactcggggaacggggtcatggtccatcaggaatcgctgtgatgtaacactgcctttgatcastttaaaattgttcttattgttattttattttattttttgagacagtttccctcctgtcccccaggctggagtgcaatggcatgatctcggctgactgcaa

SEQ ID NO: 2423 - DNA, 201 bp, Homo sapiens
ttcctggtgtctctgcgttgtgacggagttggcactgcttccctggtttgcccccaaccctctccctcttgttaccattgctgctctcagaggtgtctgtwcttaattccctttttctctcattttgattcttcgctgtgtgctggtgcttcacacgctgacgactgcgtgctctcgcctctccgaacatccaagggcctt

SEQ ID NO: 2424 - DNA, 201 bp, Homo sapiens
caccctgctccgtctatttctctttctgatggttagttcagctgtggacttttgacctggttatagccaatgggactcaattggaggggcttctggaaagyagtttgttctttaatgagagagggtgacctgagccgccttcttacctgggatgtagctatttatttatttatttttgagacagagtctcgctctgtcacc

SEQ ID NO: 2425 - DNA, 201 bp, Homo sapiens
tatcctttgcccacttgttgatgggcttgtcatttttatggaacacagtgtggtcatgtgtccacagccatacaagtcaatgactggactattggaaatcyttgctgttggcatctcacaaaccttttcctttctctcagtactttttctctaagtaatgatgcagttcaggccctcagcttgttgttttgtgatatgtgc

SEQ ID NO: 2426 - DNA, 201 bp, Homo sapiens
aactcttctgccctcagacattgaagggtctggtgtttgggtctttagactccaggactccaccctcgaattctcaagtctttgaccttggactgggggargtcacgccatcgtcaccccattgacccccctggttctcagatcttcacactcgggctggatcacaccactggctttcctggttcttcagctcgcagatgg

SEQ ID NO: 2427 - DNA, 201 bp, Homo sapiens
ttcacgcagggtcccctaaactgtattaaccgtcaccaccagttttccccagtgcccttcctctcctccagggtccacttgacattacatggagttgtcaygtctcctcagtgtcctctgatccgagacagtttctcagactttcttgttttgatgatcacgacagtttaggggagtactggtcatgtgttttgtagaagg

SEQ ID NO: 2428 - DNA, 201 bp, Homo sapiens
ctccccatttatttatttatttgtttatttctatcaatatgggctcatagaaatgtattttgtactttagttataatccgatagcacatgatgtattttgwtactcaggttgttctagctttagccatttggggctctttcaggatggctcctgtgacatgctctcattcttctgttgttttggtttttgttttttgagca

SEQ ID NO: 2429 - DNA, 201 bp, Homo sapiens
aattaaatttatttcagaaatgcaagtttgatgtaccatgtgaaaatcattcagtgcaacaaatgatgtaaggaaacaagcatgggatcttctcgaaagaygaagaaaatgtctttataaaaattcttagtcaaccaggaagataagaatatcactgttatctcttcatgagtatctaggggaaaaaaacaactgcaaact

SEQ ID NO: 2430 - DNA, 201 bp, Homo sapiens
ctttaaagaaatatagcatcacctagaatttctattatttttatatacaatgtacagcattcaatctaaaattaagagacagcccaggatatagggccaartgactgaaagccaagagagaaaacaaaattataatggacccacacgtgattaaaatagtagcactatcaggtacaagctaagaaacaatttgatttgcac

SEQ ID NO: 2431 - DNA, 201 bp, Homo sapiens
ataagaaacacaagatagaaagcaaaacatactcaggtccatcacaaactgctagaaaccccaaatcaaaaagaaccaaacagcagtcagagggagggggraaagactcattatcttcaaagaagcaacaataagactaatatttgacttttcaacacaagtgatggaagctgaaagacaatataaaaagcatctttaaag

SEQ ID NO: 2432 - DNA, 201 bp, Homo sapiens
aaacatatacctcaaaaatgagggcaaaagagcagtattttcagataaaccaaaattgggaatttatcaccggcaaatctgtactaaaggaaatacaaacragagctcttcacagagtaggaaaattatcccagaaggaagtacaatgataaaagaagaagtaataaagatcagaatgtatacatacgtgggaaaatagaa

SEQ ID NO: 2433 - DNA, 201 bp, Homo sapiens
aagaagaaatagaaaatttgaaaagggttatgtctattataagacttaaatgtattattaaaagccttctcacaaagacaactccaagtcctgctgacttyattggttaatccttccaaatatttaaggaaaaactaataccactagtagcaatatcaaaaagctcttcaggcctgggcatagtggctcatgcctataatc

SEQ ID NO: 2434 - DNA, 201 bp, Homo sapiens
cagtcaatataaaaattacgtgcatttctatataacaacagataatacaatttataaaaatacaatataatagattcaaaaatcaaatacctaggaataartttaataaaaatgagtatattagagttcttcagagcaacaaaattattaggagatattagattatgtaatataatgtatatctggagggagagagttttt

SEQ ID NO: 2435 - DNA, 201 bp, Homo sapiens
ggcttgggagggcactgtcggagaccaaagcagtgtgagcaaagccgtggaggcccagagccacatggcgtgaggctttccatttgttaggagcacagctkttgtgaaaagcgttaaaactagggagagcctggatactgggctctctttagtaaacactggaaaagccaggatttaggtagagaagtggcaggagcaggc

SEQ ID NO: 2436 - DNA, 201 bp, Homo sapiens
gcccatggaacagaggctgccccttttgctccacagggcgtactgactgcacatctgagccagaggcagaggatactgatctctctgtcttcacctcactktcctgcatccctggatacgtgatccaacacctttgatcttcaccttggcttccctgtccatttcatgtatatattatgcctcagtgtttttcagtctcac

SEQ ID NO: 2437 - DNA, 201 bp, Homo sapiens; identical to SEQ ID NO: 2258

SEQ ID NO: 2438 - DNA, 201 bp, Homo sapiens; identical to SEQ ID NO: 2259

SEQ ID NO: 2439 - DNA, 201 bp, Homo sapiens; identical to SEQ ID NO: 2260

SEQ ID NO: 2440 - DNA, 201 bp, Homo sapiens
ataaaacccttcattccttccttgctttgtttgtgtgttttttccaattctttgttcaagacgcgaagaacctggacaccctccaccattaacatattgamctagtgtgaccttcaagacccttcgcagctgggtcgagtttatctccctgcttgattttgtttggttttgttttaccacatctcctatgcttggtgccat

SEQ ID NO: 2441 - DNA, 201 bp, Homo sapiens; identical to SEQ ID NO: 2261

SEQ ID NO: 2442 - DNA, 201 bp, Homo sapiens; identical to SEQ ID NO: 2262

SEQ ID NO: 2443 - DNA, 201 bp, Homo sapiens
tgtctgtcacctcagtttgtcgttctgttaaactgcagtactgagatatttggggctgctttccacgctgcccgcagaggggtccatgcaggctttccatrgtaacttaaagggaaaccttcacagtgtcacaatgcctggagacctggacgtcctgcctatgaaggacgaggatgtgctcaagttccttgcggtaggagc

SEQ ID NO: 2444 - DNA, 201 bp, Homo sapiens
tatctatgcaaattcttgagtctcataacttccgtggcagaagttttctctatttaacagtaaaagaatccgaggctcagaatgagatggcatttctcagraaggtaacagctagagcacaggtgtgtctgactgcaaagccaccatctttttaccaagtgatgcaccctcctacatagtgggtgacagtaaatgtataag

SEQ ID NO: 2445 - DNA, 201 bp, Homo sapiens
ccgcacgtcctcgttccacacgctcacgccgatggagccagtggccccccgtccggacacgccgaggctcacggcatctccctggcttctcgtctgaaccygccccaggtcggtgctttcacacccttctccctcttgccttcactctgtgtgtctgtcacctcagtttgtcgttctgttaaactgcagtactgagatatt

SEQ ID NO: 2446 - DNA, 201 bp, Homo sapiens
cccagcctacctgggccccctgtcacaccttcatcaaatagaaacccatttatgtttcctactgagatacattcagatgccactaactgtacaaatccctstgtgttctgacccctccctccctgtgggctgctgatttttcagctttctttttattattgccaccctgaggagcccttttcgaccattcttcccaattgc

SEQ ID NO: 2447 - DNA, 201 bp, Homo sapiens
tttttctataattttctataagcttgtggaccttattgattacctaggactttctatgctttttatactcttcatattaaaagtctaagtatttttcatcyttttttggatacaacatttatagcaatttcaaaatgtcctgataatctgtgccatgtataggagctttagcgtctctgtatgatttgtagggagctgtgg

SEQ ID NO: 2448 - DNA, 201 bp, Homo sapiens
gcctgtgtccctgcttttaattctttcagtgtataccaagaagtgggattgctggatcctatggtaattttgtgtttcacttttgaggaatcacaaacgawttttttatactagctgcaccattttacgtttccaccggtgatgcacgaggattcccattcctctacatcttcaccaaaacttactttctttatctctttt

SEQ ID NO: 2449 - DNA, 201 bp, Homo sapiens
atagtgttacacagacacacatttaacaggacatgattttctagacaccatgtactacgtagtactcgtcaagcaaatggataaatactatttattatgtwttgaaaaaagagttgcccctttttgagaggtagaaataatgaagatgccatcttctgaaaagcacagaaacaaaataaaggctttgtcatgattaatgat

SEQ ID NO: 2450 - DNA, 201 bp, Homo sapiens
cactgtcggagaccaaagcagtgtgagcaaagccgtggaggcccagagccacatggcgtgaggctttccatttgttaggagcacagctgttgtgaaaagcrttaaaactagggagagcctggatactgggctctctttagtaaacactggaaaagccaggatttaggtagagaagtggcaggagcaggctgcactttagga

SEQ ID NO: 2451 - DNA, 201 bp, Homo sapiens; identical to SEQ ID NO: 2263

SEQ ID NO: 2452 - DNA, 201 bp, Homo sapiens; identical to SEQ ID NO: 2264

SEQ ID NO: 2453 - DNA, 201 bp, Homo sapiens; identical to SEQ ID NO: 2265

SEQ ID NO: 2454 - DNA, 201 bp, Homo sapiens
cagtgatcacaaactatacaacagatgacatcacacaccacgcaagatgggagtgctctttactgttgctgtgggagtttcaagaccctctgaaatgaggrgcgtctcctttctctgctggaacagtgcttctcaatgtgtgtgccattagctacctgcttgcagttaccaggtagctacttgttccctgtccatgaagcg

SEQ ID NO: 2455 - DNA, 201 bp, Homo sapiens
cggggtcatggtccatcaggaatcgctgtgatgtaacactgcctttgatcactttaaaattgttcttattgttattttattttattttttgagacagtttmcctcctgtcccccaggctggagtgcaatggcatgatctcggctgactgcaacctccgcctcccaggttcaggcttctcctgcctcagcctcccaagtagc

SEQ ID NO: 2456 - DNA, 201 bp, Homo sapiens
gccttgaccacctggctccgggagtgcttgtcaggctgctcccctgtaaagtcaccccctgcttccatactgcactcttggagtcaagcttccatactgcmctcttggagaagaaggtatgatgcccgcctcctggaaggggagacacacaccactggggtagagttcttctgtgggaaatgtgcctcttctccccattta

SEQ ID NO: 2457 - DNA, 201 bp, Homo sapiens
ttgctacagtaattctacctatcacccatttgcacaaagagaaatatataaggatgaacattgtttttaataggaaaatatcagaaacagcctaaggggtrtatcagtaggaatataattaaataatgtataacacatataatagtaaaataattcaaaagaaaaatctagagctatattagcataaatagatctcaaaaa

SEQ ID NO: 2458 - DNA, 201 bp, Homo sapiens; identical to SEQ ID NO: 224

SEQ ID NO: 2459 - DNA, 201 bp, Homo sapiens
tatcaaaacctcaaattatactacatatttgtttattctgcatctccccagaaattttagctccataagggtgggactttgtcactgattgctcagaacastgcctggcactcaagagaaacttaaaaataattgttgaatgaatgaagctagagctctctctcagaataaaagagtccactgtttttgacccataattct

SEQ ID NO: 2460 - DNA, 201 bp, Homo sapiens; identical to SEQ ID NO: 1102

SEQ ID NO: 2461 - DNA, 201 bp, Homo sapiens; identical to SEQ ID NO: 1103

SEQ ID NO: 2462 - DNA, 201 bp, Homo sapiens; identical to SEQ ID NO: 1104

SEQ ID NO: 2463 - DNA, 201 bp, Homo sapiens
cctcccaaagtgctgggattaccacagcacctgtcccaattttctttaacatagataaaatcaccactcgcaggactcaactagtttacattcctctttgrcctatgaaatgtgatatatgttttccatatcaagtttgaataaaattatcaatcaaagactccataagcatgtgtaacttagcccagttgctcccaacca

SEQ ID NO: 2464 - DNA, 201 bp, Homo sapiens
ttcaaattttcattttatgaggttcattctaatggcaataagaaaatggcatggagcaatcttgaggtaggaaatgagccatcaaggaatagaaggtagtragtcaagaagtagacaaatcagtcagtagcctatgttgatacgttgaaagcctgaatatgagcctataaaatgcctaaactaaggggctgcaataggaat

SEQ ID NO: 2465 - DNA, 201 bp, Homo sapiens
catgttatatgtcagctcccctcagtacttcctttttaaaacactcccattcattttgaagaatatttctaaaaaacagcatgtacaaaaaagtattcttrtcttctatcctaagagttctataatacctcctcatacattttctgccagacctttgctgccaaaacaaacaaaacccccaagaccaaccactagatttaa

SEQ ID NO: 2466 - DNA, 201 bp, Homo sapiens
taggaaaagtcaaatctctgtagatgtgagtttcacctcttgcaaatactgcattttcaatccttctgttgaaaaaaatccacatataagtagactcgtgmagttcaaacctgtgttgtttatggatcaactgtatttatttttcattaaatttaaaatgaaaagattatagaatgtgttaatgtgccacactgatgagca

SEQ ID NO: 2467 - DNA, 201 bp, Homo sapiens
gtaaaaccaaatatagtaggataagtaattgagtgttaggctgttacaactataaatgtgggtgggaaaaggtaggctttgatctctttgagaatgagatwttcaagcacaaatactactaagcacaaataactgaggtaactaagtaccaatttggatttctgcgaataaattgtggatgatatatggatggtgtttcat

SEQ ID NO: 2468 - DNA, 201 bp, Homo sapiens
gatttgttagccctggtactccttagactaatatagatagaaagagttaaccagtttttcttttcttatattatttctgattggcctgactctgagtacastatgcttaacaaataaaattctctgcatatgaaacaaagacttaaaaagacaaattactgttttggcaaatattcattctcaattaaaattcatgtgagt

SEQ ID NO: 2469 - DNA, 201 bp, Homo sapiens
cacctttactcaagtgccttcaaagaaaaaaaatggaaatactaaaagtatactttattttctatacataaagtacatcaagaaaataaacattgctctcytattaacaaaatgtactgaatatagtgtattcaacataccttcactgacagcatggggtttaacaatgcaacaggtacaattagtaaatttagcagtgtt

SEQ ID NO: 2470 - DNA, 201 bp, Homo sapiens; identical to SEQ ID NO: 1112

SEQ ID NO: 2471 - DNA, 201 bp, Homo sapiens; identical to SEQ ID NO: 1113

SEQ ID NO: 2472 - DNA, 201 bp, Homo sapiens; identical to SEQ ID NO: 1114

SEQ ID NO: 2473 - DNA, 201 bp, Homo sapiens; identical to SEQ ID NO: 1115

SEQ ID NO: 2474 - DNA, 201 bp, Homo sapiens; identical to SEQ ID NO: 1116

SEQ ID NO: 2475 - DNA, 201 bp, Homo sapiens; identical to SEQ ID NO: 1117

SEQ ID NO: 2476 - DNA, 201 bp, Homo sapiens; identical to SEQ ID NO: 1118

SEQ ID NO: 2477 - DNA, 201 bp, Homo sapiens; identical to SEQ ID NO: 1119

SEQ ID NO: 2478 - DNA, 201 bp, Homo sapiens
ataaatttgaagacattcaatagaaactattcaaaaataagcatggagagaaagaaaaatgaagaagaagaaaaaagccctgctgtgcaaccatgtcaagytgtctattatatgtgtaattagaatctcagaagagaagaaaaggtgataaacataaatatattttttaaaataagtgctaaaaactttccaaatttgctg

SEQ ID NO: 2479 - DNA, 201 bp, Homo sapiens
gttcccattggtctgttcccttcacaacaaaattcaaaagaaatgtctttcttttccatttccatttttacttcctctcctacagtctcttttaaatccayaaccaattaggttttcattccaccaaagctgctcattaaaatcccttactacctccatgttgctaagtccactggttaattattctcagccctcacctta

SEQ ID NO: 2480 - DNA, 201 bp, Homo sapiens; identical to SEQ ID NO: 1120

SEQ ID NO: 2481 - DNA, 201 bp, Homo sapiens
tttcaaaaggcatgggtggaattaacaagacttaaggtttcaaagaaactagcaaatgtatgccctatggtgctcttgaagtgtttgctggttttagcatytttcttcatgtgctatagggccattatgataaacaagtagcatctttaccacaggaagttagataccaagtcatcagacactagaagtatagagacacta

SEQ ID NO: 2482 - DNA, 201 bp, Homo sapiens
aagaagctggtcaggcaggcgggcagggagggtgggtcctcagttgaatcctttcaaacaaaagaacagcctgcaggcacaggtaagggaactgcacaggrtggcttgcctaagacatgcccacagccccactgataagaaaggctacacaagtgacttgcccagtcaggcttgcaatggaaaattccatcccctgacaca

SEQ ID NO: 2483 - DNA, 201 bp, Homo sapiens
aagggcatccttgactatctcagcactctttatttcattttattgataaaagaagtgaggcatggaaagaaaatgtgacttattcaagttcatatcaagamaataatcagccatataagaggaagctactgatgctctaacttctgatttttgattaattctctaaaccacacagtcattaatgtacactgaaatctccag

SEQ ID NO: 2484 - DNA, 201 bp, Homo sapiens
catgttttagactcctttctaagtcacctcctagaatttttaatcagtcacctaagagttacttattaactcaaaaactgcttagtcactgactgaaaaaygaggcagggagcagaccaaagtcaagagttcagggtcaaactgcagagagcaaagcacaatgagtgaattggtttcatctttctcctcagtcttccagag

SEQ ID NO: 2485 - DNA, 201 bp, Homo sapiens
tccctataacataattactatccagtcttgctttactattttaaagaatcctacaattcaatgctcagaaacttcctcaaaggaataaaataatgaaatarctgggacccactcttggcacttctaacatccaattcttggcaaatcctgtcaatacaactactaatatataccctgtatcagtcggcttctatatccact

SEQ ID NO: 2486 - DNA, 201 bp, Homo sapiens
gccatcatattggacagtagagacctagagaatagtagctctctcccaggaccgaggtttaacttctgagcaacattctacattaagggctgagccaagastaataatatctgcagtattaacctctctcatgctaatggaaaccttgaacataagcttgagggcagtcaatctaaccatatttctcatgctgccatccta

SEQ ID NO: 2487 - DNA, 201 bp, Homo sapiens
aaattttgattaattaattactatttgtctaaagtcttggtttcctattttagtaacaatgaatagattataacgtgttgctatcatgatttacttagatrctcaaattggtttcgattcaactagtggaaccccttcaagctggcttctgtgtcctattgatatgtcaccattactttggcataaaaagattttccaaga

SEQ ID NO: 2488 - DNA, 201 bp, Homo sapiens; identical to SEQ ID NO: 1597

SEQ ID NO: 2489 - DNA, 201 bp, Homo sapiens
aatgttttctttaatgctgagaatttttgttaatatttctgacatttcataaaacatcttttgttgacattctacaaatgatagcatccaataatgtcccratactttcttcttgtgaagagagtttatatatctgtaaaaatgaaagacaaattatgacttgctgatatcgtcattcactactaattgtcattatacaaa

SEQ ID NO: 2490 - DNA, 201 bp, Homo sapiens
actttcttcttgtgaagagagtttatatatctgtaaaaatgaaagacaaattatgacttgctgatatcgtcattcactactaattgtcattatacaaacawgtgtaagtgaaattattcctcattcaattattgggttcatggtataacaaacaacaaatgtgattaaaatattcaaagtagagggcaattcattacttgt

SEQ ID NO: 2491 - DNA, 201 bp, Homo sapiens; identical to SEQ ID NO: 1598

SEQ ID NO: 2492 - DNA, 201 bp, Homo sapiens; identical to SEQ ID NO: 1599

SEQ ID NO: 2493 - DNA, 201 bp, Homo sapiens
gtgcagatcggcagccggcagaggcccacccaggtgagcacaggtggacctgatggtggatggggacaaagagtgtgctggttgggaggagaaggcggggrcctgtagctggtctgggaattcccaagctgagcaaacggtatgtcaaggcctgtggttgggcttgttaacataaacaccacactcttaaatgatctgtaa

SEQ ID NO: 2494 - DNA, 201 bp, Homo sapiens; identical to SEQ ID NO: 1600

SEQ ID NO: 2495 - DNA, 201 bp, Homo sapiens; identical to SEQ ID NO: 1601

SEQ ID NO: 2496 - DNA, 201 bp, Homo sapiens; identical to SEQ ID NO: 1602

SEQ ID NO: 2497 - DNA, 201 bp, Homo sapiens; identical to SEQ ID NO: 1603

SEQ ID NO: 2498 - DNA, 201 bp, Homo sapiens; identical to SEQ ID NO: 1604

SEQ ID NO: 2499 - DNA, 201 bp, Homo sapiens
atgctttatagtcctcaaacatgctgaatgctgagggagttcctccattcatacagctgcttgcagtacctgggtgctatggactgaatatgtccccccaraactcctatgttgaaacctcatccccaaggtgatggtattcagaggtggggtcttgggaggtgattaggtcgtgaggatgaagtcttcacatatgggatc

SEQ ID NO: 2500 - DNA, 201 bp, Homo sapiens
tgttttgaccaatcaaaggtggcccagtgttcaaaccatgttcaaataaggcaaacgtcgagctggaaccaatccggctgtttctgtggcttacttccacyttccatacactgcttatcattttgtgtccataaatcatcttccaccacatgggtgcactggagtctctgagcctattctggctcaggaggccgcctgatt

SEQ ID NO: 2501 - DNA, 201 bp, Homo sapiens
aggtcagtttctccttccagattttgtggcagagaaactagtgaatttcaagttccttgtgttaagtaagtttagcctactgcttccttacatattttaarttcgtcctaaagggttctctgtactccacaaactgtaacctaaatgggcttgtaaatggactatagcctactctttgccactcaccatgttttgaccaat

SEQ ID NO: 2502 - DNA, 201 bp, Homo sapiens; identical to SEQ ID NO: 2268

SEQ ID NO: 2503 - DNA, 201 bp, Homo sapiens; identical to SEQ ID NO: 2269

SEQ ID NO: 2504 - DNA, 201 bp, Homo sapiens
aacaattacagatacatggcagcatgttcacattgtctcaggcttcccccaactacatctgaacagtttgaattggattaaaaagggctcctggagacttrtaggcttgcttatcctgtgggtaactgacattggttgcagtaatgataccaaggtttcttttctttttccaggtaggaaaacatgtgatttgctctattt

SEQ ID NO: 2505 - DNA, 201 bp, Homo sapiens
ccttccacccagtcccctcacctgtcaccacaagagccttgagcgtccatggagcttcagctctcagccactcattggcatccaggagatagtgtccaggrcccgtccatccctggaaagcaggctggctgccccctcattgcttggctccttaatttttgataatcataaaccctagggtcaaagagctgggctgtaaca

SEQ ID NO: 2506 - DNA, 201 bp, Homo sapiens
aggtgatctaatggctcaaaaaaccaccaactctaggaagacagacagggtgacctgaaagtgggtttcacctggtgtttttctgccattctgtgcatggygtcagcttcctcccaagactggcactgcataggacatcgggtgtttgccaacccagttgaagctctctgcttccttgctcaccaccagcagaaaggtgag

SEQ ID NO: 2507 - DNA, 201 bp, Homo sapiens; identical to SEQ ID NO: 2274

SEQ ID NO: 2508 - DNA, 201 bp, Homo sapiens
gccaggaagaagggtgggagctctgccgaggtgtccctctgagtgaccaccctcagctggagccgccaggcctctgcacagtagctgcccctgggccttgygtgtaaaatgggggtaataacagtatctacctcataaggttgctgcaagaactaaatgagttcctagaagtgaaagacacttagaaccaggatccagagg

SEQ ID NO: 2509 - DNA, 201 bp, Homo sapiens; identical to SEQ ID NO: 1605

SEQ ID NO: 2510 - DNA, 201 bp, Homo sapiens
tttctgtctctatggatttatttatcgtggatgtttcatataaatggaattgtacaatatctgaccttttatgtgtggcttctttcagttaatgttttcaraattcattcgtgttgcatcatgcatcagtatttcattcctttttagggctcaaaattccatgtatgtttataccgcactttgtttatccattcattcatt

SEQ ID NO: 2511 - DNA, 201 bp, Homo sapiens
ttaagctatagatacttgcatatgtgcaaaatagtgtacaaaattaacgactgaagcagtttgttatagcagaaaattaaaacagtttatctgtccatcartagacaaactgttaaataaattactgtatatccagataatgaagtcctacatagaatgaggaaggtctgtctataccagtatggaaagatctccaagaca

SEQ ID NO: 2512 - DNA, 201 bp, Homo sapiens
ccctcattgcttggctccttaatttttgataatcataaaccctagggtcaaagagctgggctgtaacacaatagggagtgcattccccagtgtattccccygtgtggtcacagggaatgagcctggagcaagggagcccagcaggctgagaatctgcagtgtgctgggcctgggcttggcatgaaggcacgagatgtcgga

SEQ ID NO: 2513 - DNA, 201 bp, Homo sapiens
acagaggctcctgtcactgagactgccctcagtgggacagagggaagagactattgatgcagttcgtctgcctctctgtgacactgatgtgtaggcccagyaattaaagtccactcctggcagccagccttgaacatagaactgatcggccacacagaaaacctgaaacaaagcctctaaaatgcagcctctcaaaaacgc

SEQ ID NO: 2514 - DNA, 201 bp, Homo sapiens
tgggtgctattgttcccactaaaagcccagacctctgcctcaggagacagggctcagctgcagcctcctcaactaaaacatgaagggctgcttcgtgggcrccaaagcggctccttaaactcgcaatggtgtgcaaatttatgggctcactttctacatcagatcttcaaaggtctctgtgattccaaaagcttgggaact

SEQ ID NO: 2515 - DNA, 201 bp, Homo sapiens; identical to SEQ ID NO: 1606

SEQ ID NO: 2516 - DNA, 201 bp, Homo sapiens
agtttagaacccatgcctaggccttccacactctacaggcacccagttcatccatcagtagcagaacttagagtcttcctgggactccatactgcctggaragaggaattcgttctctttcattgctgacattcctgggtgaatgcctgtggcagttatactttacccatcccattttgtacctccttccactccagggga

SEQ ID NO: 2517 - DNA, 201 bp, Homo sapiens
gcctcttcaatgatgaaagtgttttcttcctcttctacctctgcagagaggcttgctgggatagattttgtttgtaattctatttccccaccgccagaggmcggactttgggggtcaggcagctgagaaggagtttagaacccatgcctaggccttccacactctacaggcacccagttcatccatcagtagcagaactta

SEQ ID NO: 2518 - DNA, 201 bp, Homo sapiens
gtcccctcacctgtcaccacaagagccttgagcgtccatggagcttcagctctcagccactcattggcatccaggagatagtgtccaggacccgtccatcyctggaaagcaggctggctgccccctcattgcttggctccttaatttttgataatcataaaccctagggtcaaagagctgggctgtaacacaatagggagt

SEQ ID NO: 2519 - DNA, 201 bp, Homo sapiens
taggttttacctatcattatggtaaagaattaaaagaatggtatgagctaatgtaggacaagcacaaagaaatgtgcagacacacacacttttgatggaayactgaaatgggagatccttgctggagaatcattacacagcatgtcaaaatcctttttttaaatcaaaatagagtctcaccccattgctcaggccagagtg

SEQ ID NO: 2520 - DNA, 201 bp, Homo sapiens; identical to SEQ ID NO: 1607

SEQ ID NO: 2521 - DNA, 201 bp, Homo sapiens; identical to SEQ ID NO: 1608

SEQ ID NO: 2522 - DNA, 201 bp, Homo sapiens; identical to SEQ ID NO: 1609

SEQ ID NO: 2523 - DNA, 201 bp, Homo sapiens; identical to SEQ ID NO: 1610

SEQ ID NO: 2524 - DNA, 201 bp, Homo sapiens; identical to SEQ ID NO: 1611

SEQ ID NO: 2525 - DNA, 201 bp, Homo sapiens
tttttttttttttttttttgataatgggtttgtctcaatccaaagattctgggactctaccttctgggactccatctaatttgatatgtaaaattatggayccagaatatgtgcatttttagaaaaatagattaaccttactagagaaaagatggccacaatggggaagttttaatttgtataaaattgtttatttgcatg

SEQ ID NO: 2526 - DNA, 201 bp, Homo sapiens
atatccagtgcctcagtgcgaagttccagtttaacttcctgttacctcgagcccactatcttgccccaataataccctcccccaattcacaaacacagacrcattccctcctacagctttgggcctcctatctgagtccttcaggaaagaagagcttgtaactcccttagcagtgagtgtagacttggtccaaggaagatg

SEQ ID NO: 2527 - DNA, 201 bp, Homo sapiens
aaattacttattagccgaagaaaggtgaaaggaagtttggaattaacagtctagattttctcactgattggtccaagtcactgacctctaaaattatcttrgatcatgccctccctccttcctactttctggaaaacaatcagtctcctaccctatgcttgcccaaagagtttcccatacaaatcacaaatctgcacttgc

SEQ ID NO: 2528 - DNA, 201 bp, Homo sapiens; identical to SEQ ID NO: 1612

SEQ ID NO: 2529 - DNA, 201 bp, Homo sapiens; identical to SEQ ID NO: 1613

SEQ ID NO: 2530 - DNA, 201 bp, Homo sapiens; identical to SEQ ID NO: 2275

SEQ ID NO: 2531 - DNA, 201 bp, Homo sapiens; identical to SEQ ID NO: 2276

SEQ ID NO: 2532 - DNA, 201 bp, Homo sapiens; identical to SEQ ID NO: 1614

SEQ ID NO: 2533 - DNA, 201 bp, Homo sapiens; identical to SEQ ID NO: 2277

SEQ ID NO: 2534 - DNA, 201 bp, Homo sapiens; identical to SEQ ID NO: 1615

SEQ ID NO: 2535 - DNA, 201 bp, Homo sapiens; identical to SEQ ID NO: 1616

SEQ ID NO: 2536 - DNA, 201 bp, Homo sapiens; identical to SEQ ID NO: 1617

SEQ ID NO: 2537 - DNA, 201 bp, Homo sapiens; identical to SEQ ID NO: 2279

SEQ ID NO: 2538 - DNA, 201 bp, Homo sapiens; identical to SEQ ID NO: 1618

SEQ ID NO: 2539 - DNA, 201 bp, Homo sapiens; identical to SEQ ID NO: 1619

SEQ ID NO: 2540 - DNA, 201 bp, Homo sapiens; identical to SEQ ID NO: 1620

SEQ ID NO: 2541 - DNA, 201 bp, Homo sapiens; identical to SEQ ID NO: 1621

SEQ ID NO: 2542 - DNA, 201 bp, Homo sapiens
gtcaaaaccccacaaaaacagtgggatatagtctttcattggtacatggaagcctctaaaagacaaaatgaatgaaaacttgcctccttaaaagattcttygcaaaagcaagtgaacagcttaagtaacaggctaaggacatgatgaaagagaactgtactctgactgaactaaccccaactgattcttctctttatgcat

SEQ ID NO: 2543 - DNA, 201 bp, Homo sapiens; identical to SEQ ID NO: 1622

SEQ ID NO: 2544 - DNA, 201 bp, Homo sapiens
cttacctcaaaaaaaaccttcccaggtgttttcaaaggaattattttattcctccacaacaagcctgtgggagtcggagcaaaaggcaaagtgattacctragacattagataactcgccaatattcaccctgctaacaactgaggggccttgggcttgatctcctgcttccgaatcagggcttttcctgccatcttgtca

SEQ ID NO: 2545 - DNA, 201 bp, Homo sapiens
ttttagttttgaaagacccaagtgtcattctcagtagacattttgaaagacccaaatgtcattctcagtaggtacatctcagtaacatctgttgaagggtrtaacaacgaagcttgatccaccagtggactgaaatgatactgggcttactaagactgaagagttcctataaccagtaattaaaaatgggccagcctccta

SEQ ID NO: 2546 - DNA, 201 bp, Homo sapiens
tagtgaaattagtcatataaccatgaaaaaatattttcagtgtcaagatttcacaaatgaagaaaattaggagtctcaaatttttatacatcatgcattcrtaaattgtggagggacggatcagaccactggcgagctggagggctggcagacacccctggaccaacttggtcaaagtgggaccctttttcctcaagaaca

SEQ ID NO: 2547 - DNA, 201 bp, Homo sapiens; identical to SEQ ID NO: 850

SEQ ID NO: 2548 - DNA, 201 bp, Homo sapiens
taaacattacccaaagacccaggatcactttattcgacattttattgtggtctgtcctcttgggcattgtggtatgtgaggtctggctccaggcctgctgycaacaagggccatgtccagtatggggtgctgacagtttggtagaaaaacattccacctgttccaaatgctctctgataaaccctccttacggttccacag

SEQ ID NO: 2549 - DNA, 201 bp, Homo sapiens; identical to SEQ ID NO: 853

SEQ ID NO: 2550 - DNA, 201 bp, Homo sapiens
aagcgatgctcttgcctccgcctcccaaagtgttgagattacaggtgtgagccactgcaccaagccaaaatctgctattgtaaccatttttaagtggtacrctttaagtgtcgtaagtgcattcacactgtggtgtaaccctcaccaccatccatctctagaactcttctcactttgcaaaactagagctctgtacccact

SEQ ID NO: 2551 - DNA, 201 bp, Homo sapiens
ttggctgtccctgcttctccaggcaagcttttggaatattctgaataagagctggagagtcaaagaaagagaaaacaaagcccctttctatctcccatacktttccttcctgcaggaaaagggacacagtaccatgcagttgaacaccatgtcaagtgaggataaaggaaaacagccatgacatcactccattactgccac

SEQ ID NO: 2552 - DNA, 201 bp, Homo sapiens
aaacttattctaccctcttagggtctgtggctgggcctgagaattaaatagacatacgataaataggagagaagcatacacattttatttaatcttttatktgaatcaagggaaccctcatatggagaatagagacccaaagaacagttgggatcaagagcttatttactttttaaagaaatgatacatttgtggaaaatt

SEQ ID NO: 2553 - DNA, 201 bp, Homo sapiens
tgtgaagcatttagacctgtggtctgtacatggaaaattctatgttcttgtgagctggtattatcatctctgtttgtatgtggaacagtttaagagcatgrtctacacaaatgagacactctttaatcctcttcatggatgtagttagctaagcctgcctggtgatcacccagtgagccaaattaacatggagtcaatttg

SEQ ID NO: 2554 - DNA, 201 bp, Homo sapiens
cagtaagacctgggaagctgaaacacgatcgcgtttgttggaaatctataaatacatacaaagcggggaagggtaagcttggcctttgaatctggataagstagagacttttcttttttgagatggaggcttgctctgtcacctaggctgaagtgcagtggtacgacctcggctgactgcaacctctacctcctgggttca

SEQ ID NO: 2555 - DNA, 201 bp, Homo sapiens
caaagcatcttaattgtagtttaagggttaagtatcaaaaaaagggcatccaataaactcagtgggaggaaaaaaaggtgaacctagaagcgacccagctyacctcagcagcttcattcatcttgacgatcatggcactcacgacgtcgtctgcatcactaataaaggtgccaccatcgcggttccgtctgcgcttgccac

SEQ ID NO: 2556 - DNA, 201 bp, Homo sapiens
atatttaaggtggtatctaaaattcctatatctagagccctaagtctattactattgtcatcattactgttaccttttaatgttatttttgtgtataatamgtacatatgaaaaacttaaaccactgtaatcttatttctgagactgagattctctagtctgccagaagattcaaagatggcctaaaatctgagcaaaggc

SEQ ID NO: 2557 - DNA, 201 bp, Homo sapiens
ttactctctaggatactgataaaggaagggacttccatgtcaatttctaaatattcaagaggccttgaatatcccaaggtgcctgttagggtcattatttygaaactaaaagcagacctggcctcttctgattaagaaagcacacacacacacacttttcactctgactgttgacaattcaagcccatgcacagtacatgc

SEQ ID NO: 2558 - DNA, 201 bp, Homo sapiens
ctgattaagaaagcacacacacacacacttttcactctgactgttgacaattcaagcccatgcacagtacatgcttccttgggaatacctctcgtgtatayactctggtagggccaggcctataggggcatcctgttgccttcaatgctgaacttgacagcacgatgcactttgctgagtcgtttctgttctgcaaatcgc

SEQ ID NO: 2559 - DNA, 201 bp, Homo sapiens
agataccacaacaattttcttttggtccatgtttacacaaagtcccctttcatacacctttattttcagctttaccttctgtttcagacaaatctcttgamatcagtatatggctggtttttaagatcctgtctggcaattgttgtcctttaactggaatatttactatttacatttaatttaatttctgatattatcaaa

SEQ ID NO: 2560 - DNA, 201 bp, Homo sapiens
accattaataataaaacattaaattttttctgtgatttttttaaaatacaggattatgtgcacctaaatggagaattcttgtcctatacccatatagaaayacccccacagaaagccaatcagtgaaatggttttatttggatccccaaatggggaaatataaccagccttcatcaaaacagatttgtaaagcatgccctc

SEQ ID NO: 2561 - DNA, 201 bp, Homo sapiens
tcacacaccccttgccattccatacctgtcttgcctgcagaggccggtagcaaaaaccaagtgcagcctgccaggccgagtgggcagggtgagtccaggcraatccaagtgagcccagagcccagcaaggcccaagcaggggcactgctgaccccagaggtttcctgccaaccggaagtggcactctccaaaaaaatcctg

SEQ ID NO: 2562 - DNA, 201 bp, Homo sapiens
caagtaacatgttcaattctccatgtcactaaatattctttgaaagcaattccaatagctgcattgccatttttataaatgttctatttacagtttaatcrctcattttctacattgttgagtatttgtttcctttcttatgtttattacacctcatttgtccatttcagtgttttcaacccaagggcggctctgggtctt

SEQ ID NO: 2563 - DNA, 201 bp, Homo sapiens
tgctggaaattatacagttaagcttaaaagttatcaaaacaatatccaaagtttttagagtggttttggcaattaaattgcaagcttaaaaaaaatccaamagacagttttttaaaagtcagatgagtacaacaaaccaacagttgaaactgacatttaatgtcatttctaaaataatgtaacacatttcctagttgtaat

SEQ ID NO: 2564 - DNA, 201 bp, Homo sapiens; identical to SEQ ID NO: 1016

SEQ ID NO: 2565 - DNA, 201 bp, Homo sapiens
atagtcatttctgtagttggactatgctggttttaatttttttctttaaacttcacagatgcaggagtgcctcaacttattatggggttacagcctgatamacccatagtaagctgaaaatataattaagccaaaaacgcatttcatacatctaatctaccaaacatcacagcttagcctagcctaccttagatgtgctcc

SEQ ID NO: 2566 - DNA, 201 bp, Homo sapiens
ctacattgattgacttccaggagagccttcgaaacaccagtgctcactgacctaaccttctctgctggtcttacatagaactggtctggggaactcactcwatttccatgctatctctagccaaaatacttaacttcttgcacaaaaatcataaaataaagaattacaaataaatcactccccctgcaaactcaaagatca

SEQ ID NO: 2567 - DNA, 201 bp, Homo sapiens; identical to SEQ ID NO: 1018

SEQ ID NO: 2568 - DNA, 201 bp, Homo sapiens; identical to SEQ ID NO: 1019

SEQ ID NO: 2569 - DNA, 201 bp, Homo sapiens; identical to SEQ ID NO: 1020

SEQ ID NO: 2570 - DNA, 201 bp, Homo sapiens
ctgaatagcatacttaattatattgaggtttttttttaaagtctaagagaaaatgctagtacctgtaagaagttattcaaaaatttctattccactttacygactcgtttaaaacaaatactggtaaaaatacagcttttatatatacgcatctctctcttatctatacacataaacacaacaaacaaaaaggaaaattta

SEQ ID NO: 2571 - DNA, 201 bp, Homo sapiens
attattttgtccataaaattgcatttccatttttttcaaataattgcaccccagtgtgaggggatattctagacatttagaatattctttccttgaagagyccattatttcagagtaatttataggataaacaaagcataatgccagtgtactgactgactctggctgattcagaaaatttaatgtaaaagatcaccacag

SEQ ID NO: 2572 - DNA, 201 bp, Homo sapiens
tcttctctcccactaagtcaccaacatatgacagctttgcctctgcaatgtcttctcacccctctgtttcccaactaccacctctgtttagctgtatcacygcctcagtcccactgccctccaatccatcctacatgatgccattggcatcagcaccctaaatcaaatcaaaccagatggcttcacatccagcctcaaaaa

SEQ ID NO: 2573 - DNA, 201 bp, Homo sapiens
cttccctatctgtcctaccacaaaaggtgtgaagccatctaacccaaacttaattattcagcattaccttccattaagctattccattttctagccacaayaatcattcctgaaatatatcaagtccttcttaatgttaggccctgtacctgttgctcttctagctagacagaattaccaccacccctatcgccaccccta

SEQ ID NO: 2574 - DNA, 201 bp, Homo sapiens
cccccaaatatccacaactggcttgctaaaaatctcttgttcaggaaagcaacacaaggctgctctctctggaggtgtggccacaggcaggacccggaggwcctcacccatacacacatagaggaaactccatgagatgaaagagctcaatgggcccaatacagattgcgctaacagacaagagaagcataataggtccct

SEQ ID NO: 2575 - DNA, 201 bp, Homo sapiens; identical to SEQ ID NO: 1024

SEQ ID NO: 2576 - DNA, 201 bp, Homo sapiens; identical to SEQ ID NO: 1025

SEQ ID NO: 2577 - DNA, 201 bp, Homo sapiens; identical to SEQ ID NO: 2202

SEQ ID NO: 2578 - DNA, 201 bp, Homo sapiens
cagatcaaaaacataacagtcacttggaggataaccacaatgagggagccctacctattaggcacctactggatgctgggcatcctgctgggcacatccawccccatggcctctctgtgcactgacatctgacgtctttctcagggagaagaaaactgaagctcatgggggtgaagtgacttttgccctaggccagatagc

SEQ ID NO: 2579 - DNA, 201 bp, Homo sapiens
attttacccacacactgatagaagaaaatgcttcaaggagaactcatttacccagataacttcctttaattaggaaatttcaaaaaattccctgaatggtktagataatatgtttgtccaatcatgacttcacaagggatctgaagcaacgtagttctggtccagaactgtcagtgctgaggagattcccagtgtccacag

SEQ ID NO: 2580 - DNA, 201 bp, Homo sapiens; identical to SEQ ID NO: 1029

SEQ ID NO: 2581 - DNA, 201 bp, Homo sapiens; identical to SEQ ID NO: 1030

SEQ ID NO: 2582 - DNA, 201 bp, Homo sapiens; identical to SEQ ID NO: 1031

SEQ ID NO: 2583 - DNA, 201 bp, Homo sapiens; identical to SEQ ID NO: 1032

SEQ ID NO: 2584 - DNA, 201 bp, Homo sapiens
ctccttatgtttctgagtaattgtataaacatagttgtcttctcttttatattgcagatatgggactgctgaactgtgtgcacaccatgtcaccatagtgkctcatctggtgcgtagaattacaaggcctaaaacacccactttctatgcacttcctttggggatatgataatctttaagaatgtgaatatcggcgggaga

SEQ ID NO: 2585 - DNA, 201 bp, Homo sapiens; identical to SEQ ID NO: 1033

SEQ ID NO: 2586 - DNA, 201 bp, Homo sapiens; identical to SEQ ID NO: 1034

SEQ ID NO: 2587 - DNA, 201 bp, Homo sapiens; identical to SEQ ID NO: 1035

SEQ ID NO: 2588 - DNA, 201 bp, Homo sapiens; identical to SEQ ID NO: 1061

SEQ ID NO: 2589 - DNA, 201 bp, Homo sapiens; identical to SEQ ID NO: 1062

SEQ ID NO: 2590 - DNA, 201 bp, Homo sapiens; identical to SEQ ID NO: 1036

SEQ ID NO: 2591 - DNA, 201 bp, Homo sapiens; identical to SEQ ID NO: 1037

SEQ ID NO: 2592 - DNA, 201 bp, Homo sapiens
tccaatttctatattgacagacataccttcctaatgagctggggttcgaatttagaaatctttgatgcttcagagtccacactgaaatgtggaggcacatrgtgagttggtccccagccttcagtccacccaccttctctttactaaatcacctttcacatacatgtatgaacaccccagcctccaagtccaaaccctaaa

SEQ ID NO: 2593 - DNA, 201 bp, Homo sapiens
cccaccttctctttactaaatcacctttcacatacatgtatgaacaccccagcctccaagtccaaaccctaaacaaaatgggacacccttgtgcatacacrgagacacagcccatcctcaggaaaacctggaaaagtccatacaagttctggaagcaagcttgggacggtttcagtagtgtggtctataagggaggcctca

SEQ ID NO: 2594 - DNA, 201 bp, Homo sapiens; identical to SEQ ID NO: 1063

SEQ ID NO: 2595 - DNA, 201 bp, Homo sapiens; identical to SEQ ID NO: 1064

SEQ ID NO: 2596 - DNA, 201 bp, Homo sapiens; identical to SEQ ID NO: 1065

SEQ ID NO: 2597 - DNA, 201 bp, Homo sapiens; identical to SEQ ID NO: 1038

SEQ ID NO: 2598 - DNA, 201 bp, Homo sapiens; identical to SEQ ID NO: 1039

SEQ ID NO: 2599 - DNA, 201 bp, Homo sapiens; identical to SEQ ID NO: 1040

SEQ ID NO: 2600 - DNA, 201 bp, Homo sapiens
tcttctggcttgctgaaagttttttctttccattttaaaaatcgtgaattcctttttgcaatattgaggtggttatatggtttctcttctctaatctgttratatggtgatttaatggttagaaattttctaatgtaaattccactcatattgcagaaataaacctaaactgagcatgaggctatattttttatttgcttc

SEQ ID NO: 2601 - DNA, 201 bp, Homo sapiens
attttttatttgcttctatatttggttgctatacagtattatgtttaagatttgttcacatatatttgtgaatgggattggactatttttccttcttgccratttttatctggtttttaaattaaggatattttagacttatgaaatatttggcaaacaatccttggcaagtaattttttggggaatttgttttggctatt

SEQ ID NO: 2602 - DNA, 201 bp, Homo sapiens; identical to SEQ ID NO: 1066

SEQ ID NO: 2603 - DNA, 201 bp, Homo sapiens; identical to SEQ ID NO: 1067

SEQ ID NO: 2604 - DNA, 201 bp, Homo sapiens; identical to SEQ ID NO: 1041

SEQ ID NO: 2605 - DNA, 201 bp, Homo sapiens; identical to SEQ ID NO: 1068

SEQ ID NO: 2606 - DNA, 201 bp, Homo sapiens; identical to SEQ ID NO: 1042

SEQ ID NO: 2607 - DNA, 201 bp, Homo sapiens; identical to SEQ ID NO: 1069

SEQ ID NO: 2608 - DNA, 201 bp, Homo sapiens; identical to SEQ ID NO: 1070

SEQ ID NO: 2609 - DNA, 201 bp, Homo sapiens
caatgcttggtcagggcttgaaccctctgaagcaatggcctgagctgtacgttgacaccttttagcctagacatctaggacacagggcaccatgacccgargcttcataaagtgggagggccttgggactagctgaggaaaccatttttccatcctaggcctccaggcctgtgatgggaagggcagccatgaaggtgcctg

SEQ ID NO: 2610 - DNA, 201 bp, Homo sapiens
aactgtatcttcagatacacaggtaagaagaatgccatatgattattaagatacaacaatgccatctgtgccatgcagtgcttaagtacctaccattttaygataaaacagaataatttttcttaatgttttagtaatttttatctgctagcttgaaataattggagatagaggcttttgaaagatacattccacatgagt

SEQ ID NO: 2611 - DNA, 201 bp, Homo sapiens; identical to SEQ ID NO: 1071

SEQ ID NO: 2612 - DNA, 201 bp, Homo sapiens; identical to SEQ ID NO: 1043

SEQ ID NO: 2613 - DNA, 201 bp, Homo sapiens; identical to SEQ ID NO: 1072

SEQ ID NO: 2614 - DNA, 201 bp, Homo sapiens; identical to SEQ ID NO: 1044

SEQ ID NO: 2615 - DNA, 201 bp, Homo sapiens; identical to SEQ ID NO: 1789

SEQ ID NO: 2616 - DNA, 201 bp, Homo sapiens; identical to SEQ ID NO: 1045

SEQ ID NO: 2617 - DNA, 201 bp, Homo sapiens; identical to SEQ ID NO: 1046

SEQ ID NO: 2618 - DNA, 201 bp, Homo sapiens; identical to SEQ ID NO: 1047

SEQ ID NO: 2619 - DNA, 201 bp, Homo sapiens; identical to SEQ ID NO: 1048

SEQ ID NO: 2620 - DNA, 201 bp, Homo sapiens; identical to SEQ ID NO: 1049

SEQ ID NO: 2621 - DNA, 201 bp, Homo sapiens; identical to SEQ ID NO: 1050

SEQ ID NO: 2622 - DNA, 201 bp, Homo sapiens; identical to SEQ ID NO: 1790

SEQ ID NO: 2623 - DNA, 201 bp, Homo sapiens; identical to SEQ ID NO: 1051

SEQ ID NO: 2624 - DNA, 201 bp, Homo sapiens
ctctagaatattcatttaatgctccagaagtaattagcacaattgtgcaagtctgtgcatcatcaactatacattctgcctgtttactccaaatccacatraaactgattatacagtcaaaggcgagcccagtggagaggcatttttggagacttcctggtacattgagacagggtcggccagtctgcgttagggtcttgg

SEQ ID NO: 2625 - DNA, 201 bp, Homo sapiens
ctatcgtaggttaagatttcttttcttttcagtaatgtagaatttaatttaatacctctgttgtcatttgttatttgtatcgcacctaataattcaaagargagttatattttctcggaaaaattttatactgtgtttaagaggggttttttttgtttttgtttttagaaaatattgtctcatttgtaagcttagctaatt

SEQ ID NO: 2626 - DNA, 201 bp, Homo sapiens; identical to SEQ ID NO: 1793

SEQ ID NO: 2627 - DNA, 201 bp, Homo sapiens; identical to SEQ ID NO: 1052

SEQ ID NO: 2628 - DNA, 201 bp, Homo sapiens
tttcttacaaaatgatttcccaggagatctcatcaaatgcacgaggataccttctcagtttcacctagtgagtaaaagactggtaacatagctcacttacratttggataaacaaaactaaacaaacaacatcaaaatttcagaaaaaataatagcaaaacagaaatcaaacactcaaatttttggtccttctgtttattt

SEQ ID NO: 2629 - DNA, 201 bp, Homo sapiens
gcataaactatatacaggcataccttggagatactatgggtttggttcccacaatatctccaaaaccacattcggttttatgaccactgccataaaaccarccacatgaattttttggtttcccaatgtatatcaaagttacatttttactataccatagtctattatatatacaatagcattatatctaaaaaacaacgt

SEQ ID NO: 2630 - DNA, 201 bp, Homo sapiens
agaaggttttcagttggctttgcccggatccatcagacgaatccctatctatggaagctatagatttataaaatgtatttctttttttgtgggggcatagsgtctcaccctgtcacccaacctggaatgcagtggcacagtcataactcactgaagactcaaactcctgggctcaagtgattcttccaccttggcctccca

SEQ ID NO: 2631 - DNA, 201 bp, Homo sapiens
aggcctgagtagagggagggagatggggaaacagccagtcatcagagcacacacaacatttatcaattaagtttatcaccttgagggcacaggtcatgatrcttcaaaacaattacaataataaaataaaaaatcattgatcgcagatcaccataacagatataatgataatgaaaaatttgaagtattgtgagaattacc

SEQ ID NO: 2632 - DNA, 201 bp, Homo sapiens; identical to SEQ ID NO: 1053

SEQ ID NO: 2633 - DNA, 201 bp, Homo sapiens; identical to SEQ ID NO: 1795

SEQ ID NO: 2634 - DNA, 201 bp, Homo sapiens; identical to SEQ ID NO: 1796

SEQ ID NO: 2635 - DNA, 201 bp, Homo sapiens; identical to SEQ ID NO: 1076

SEQ ID NO: 2636 - DNA, 201 bp, Homo sapiens
agttgagtaaatcaaagatgggactgttaagttatttgtgttatttacctgctttttgaaaatgtaaaaataaaactctaggtttaattagtagtatgctrtttagtaatgaagtaaagctagaggcttcgaacaaatcttgtgtaatttcctcttgaatgagagagaaaatttaaagtaagcaaacaaataagttgtgtg

SEQ ID NO: 2637 - DNA, 201 bp, Homo sapiens; identical to SEQ ID NO: 1798

SEQ ID NO: 2638 - DNA, 201 bp, Homo sapiens
gatcagatccagtgaggtgtgtaataacctgaacagctgacatctatgtctccatggctgatggtctggattatcacttacacactttactaaatccttarcatatctttcacaaagcagataaagagtgatttttatgttatgtgttttatgtctgaagtttcctttaaataaaagctttcttagtgcattatgttgtag

SEQ ID NO: 2639 - DNA, 201 bp, Homo sapiens; identical to SEQ ID NO: 1800

SEQ ID NO: 2640 - DNA, 201 bp, Homo sapiens; identical to SEQ ID NO: 1077

SEQ ID NO: 2641 - DNA, 201 bp, Homo sapiens; identical to SEQ ID NO: 1078

SEQ ID NO: 2642 - DNA, 201 bp, Homo sapiens; identical to SEQ ID NO: 1079

SEQ ID NO: 2643 - DNA, 201 bp, Homo sapiens; identical to SEQ ID NO: 1080

SEQ ID NO: 2644 - DNA, 201 bp, Homo sapiens; identical to SEQ ID NO: 1081

SEQ ID NO: 2645 - DNA, 201 bp, Homo sapiens; identical to SEQ ID NO: 1082

SEQ ID NO: 2646 - DNA, 201 bp, Homo sapiens; identical to SEQ ID NO: 1083

SEQ ID NO: 2647 - DNA, 201 bp, Homo sapiens; identical to SEQ ID NO: 1084

SEQ ID NO: 2648 - DNA, 201 bp, Homo sapiens; identical to SEQ ID NO: 1085

SEQ ID NO: 2649 - DNA, 201 bp, Homo sapiens; identical to SEQ ID NO: 1086

SEQ ID NO: 2650 - DNA, 201 bp, Homo sapiens; identical to SEQ ID NO: 1087

SEQ ID NO: 2651 - DNA, 201 bp, Homo sapiens; identical to SEQ ID NO: 1088

SEQ ID NO: 2652 - DNA, 201 bp, Homo sapiens
cagcctcaccagcatctgttgtttgactttttaataacggccattgtgactggtgtgagatagtatctcgttgtgattttgatttgcatttccctgatagytttttcatatgatggttggcctcttgtgtgtcttgttttgagaagcgtctgttcatgtcttttgcccattttctaatggggttgttttttacttgttcag

SEQ ID NO: 2653 - DNA, 201 bp, Homo sapiens; identical to SEQ ID NO: 1089

SEQ ID NO: 2654 - DNA, 201 bp, Homo sapiens; identical to SEQ ID NO: 1054

SEQ ID NO: 2655 - DNA, 201 bp, Homo sapiens; identical to SEQ ID NO: 1055

SEQ ID NO: 2656 - DNA, 201 bp, Homo sapiens; identical to SEQ ID NO: 1056

SEQ ID NO: 2657 - DNA, 201 bp, Homo sapiens; identical to SEQ ID NO: 1057

SEQ ID NO: 2658 - DNA, 201 bp, Homo sapiens; identical to SEQ ID NO: 1058

SEQ ID NO: 2659 - DNA, 201 bp, Homo sapiens; identical to SEQ ID NO: 1059

SEQ ID NO: 2660 - DNA, 201 bp, Homo sapiens; identical to SEQ ID NO: 1060

SEQ ID NO: 2661 - DNA, 201 bp, Homo sapiens
gaagactggcatggacacagtccccttgtacatctgaacccacaggtaccagtcatcgaagcgggtgtagttccggatggctttgttatactctgcagtgrgggagatgggataatggacatatgagtgattagggagaaaaaaggcaggcctggacagcggaagcgagaacttacactttggaaagagcaccaggatgca

SEQ ID NO: 2662 - DNA, 201 bp, Homo sapiens
caatttggcagaactctaaatctatctaattcactctaggtctctcttccatcctcaacctgtccctccaaaaaaagtactcaagcaattaacaaagtacmttatttgacttatacatcagaatgagcttgctttgccagactcatagaaagatgatcacattctttgatcattcctacctgaagaccaggccagtaggcc

SEQ ID NO: 2663 - DNA, 201 bp, Homo sapiens
gttcctgacactcaatttggcagaactctaaatctatctaattcactctaggtctctcttccatcctcaacctgtccctccaaaaaaagtactcaagcaaytaacaaagtacattatttgacttatacatcagaatgagcttgctttgccagactcatagaaagatgatcacattctttgatcattcctacctgaagacca

SEQ ID NO: 2664 - DNA, 201 bp, Homo sapiens; identical to SEQ ID NO: 1326

SEQ ID NO: 2665 - DNA, 201 bp, Homo sapiens
catggggataattaactcctagtaagaaaaccacccagagccactgaaaggaacagatggaaagaaatgaacttgtgggcagttgtggaggatggagcctwgtagaggggatttggggtttcagcaaccagagcctgtgggcagatgacaagccagaaatgctgctcacctggccgaagtgggtagccctctcgcttctcc

SEQ ID NO: 2666 - DNA, 201 bp, Homo sapiens
agctaaccgcatttagccgtctctccagctgcatgagaaaattaactagagtcacaattgcccgtagccaccaatcctttctttgaatgaaatctcatgaracagcccaatatgtaaaacatgataaccaaaatatgatagccaaaagcaatttattatagtttagcctcaaaaaaataaaaataaaaaaattatccagtg

SEQ ID NO: 2667 - DNA, 201 bp, Homo sapiens; identical to SEQ ID NO: 1328

SEQ ID NO: 2668 - DNA, 201 bp, Homo sapiens; identical to SEQ ID NO: 1330

SEQ ID NO: 2669 - DNA, 201 bp, Homo sapiens; identical to SEQ ID NO: 1331

SEQ ID NO: 2670 - DNA, 201 bp, Homo sapiens; identical to SEQ ID NO: 1501

SEQ ID NO: 2671 - DNA, 201 bp, Homo sapiens
gaatcctaaataatctagtgtggatataaatgaaataaggttggccatgaattcatcatctttgaagctagtttgttgaaattgggtgatgagcacacaarggatggatgtcctgttcgctccatttttgtttatttaaaattttacttagccaggcatggtggcatgcacctgtggtcccagcttcttgggacgctgggg

SEQ ID NO: 2672 - DNA, 201 bp, Homo sapiens
aactccatctcaaaaagaaaaaagcagaaaataattgatgtggtttggctgtgtccccacctaaatctcaccttgaattgtagctcccatatttctcacgygttgtggaagggacctggtgggagataattgaatcatgggggccgtttcccccatactgttctcatggtagtgaataagtctcacaagatctgatggttt

SEQ ID NO: 2673 - DNA, 201 bp, Homo sapiens; identical to SEQ ID NO: 1339

SEQ ID NO: 2674 - DNA, 201 bp, Homo sapiens; identical to SEQ ID NO: 1340

SEQ ID NO: 2675 - DNA, 201 bp, Homo sapiens; identical to SEQ ID NO: 1341

SEQ ID NO: 2676 - DNA, 201 bp, Homo sapiens; identical to SEQ ID NO: 1342

SEQ ID NO: 2677 - DNA, 201 bp, Homo sapiens; identical to SEQ ID NO: 1343

SEQ ID NO: 2678 - DNA, 201 bp, Homo sapiens; identical to SEQ ID NO: 1344

SEQ ID NO: 2679 - DNA, 201 bp, Homo sapiens; identical to SEQ ID NO: 1345

SEQ ID NO: 2680 - DNA, 201 bp, Homo sapiens; identical to SEQ ID NO: 1351

SEQ ID NO: 2681 - DNA, 201 bp, Homo sapiens; identical to SEQ ID NO: 1352

SEQ ID NO: 2682 - DNA, 201 bp, Homo sapiens; identical to SEQ ID NO: 1354

SEQ ID NO: 2683 - DNA, 201 bp, Homo sapiens; identical to SEQ ID NO: 1355

SEQ ID NO: 2684 - DNA, 201 bp, Homo sapiens; identical to SEQ ID NO: 1356

SEQ ID NO: 2685 - DNA, 201 bp, Homo sapiens; identical to SEQ ID NO: 1503

SEQ ID NO: 2686 - DNA, 201 bp, Homo sapiens; identical to SEQ ID NO: 1357

SEQ ID NO: 2687 - DNA, 201 bp, Homo sapiens
ggctgaccagtgacttccaccacaagggagagaaaggtggccaggttctggcatagagaaggtggcggaggttgttgcctaattcccaatatctgttcccygcttcctccttagtagcaggattcctaactttagctaagcacaggctgcctggctgccaacactaactattctaacagctaggtgggattaaggacacca

SEQ ID NO: 2688 - DNA, 201 bp, Homo sapiens; identical to SEQ ID NO: 1505

SEQ ID NO: 2689 - DNA, 201 bp, Homo sapiens
tgggatcccccgtggcacggtagaggtacattgcgctttcaataagttctgcaaagtccaaagcagaccctcctcactcagtggctgcacagagatggccwggggcctcttagggccgtgagggactactcccctccatatcttgtccataaggccccaactagcaggaacacaggatacctcacccagtgctgagtttca

SEQ ID NO: 2690 - DNA, 201 bp, Homo sapiens
ttattgctttactttcctgtgcatctgaccaactctgtcgagcagtggtccccaaccgttttggcaccagggaccagtttcatggaagacaatttttccakgaactgggcttgtaggagatggttttgggataattcatgtgcattacatttattgtgcactttatttatattattattacattgtaatatataatgaaat

SEQ ID NO: 2691 - DNA, 201 bp, Homo sapiens
accccatctaaacaaaaaatttaaaaattagccaggtgtggtggtgtgggcctgtagtcccagctattcgggaggctgaggcgggagaatcacttgtgccygtgaggctgcagtgaactgtgatcaccccactgggtgacagggtgagacgctgtctcaaaatacataaatacacaaataaaaataaaaacaaaagtaaaa

SEQ ID NO: 2692 - DNA, 201 bp, Homo sapiens; identical to SEQ ID NO: 1361

SEQ ID NO: 2693 - DNA, 201 bp, Homo sapiens
cgctaaactcaccttttcaaagtcacctattcaaacagatcaaagatctccactgtgggaggaatgccaagggccggggtcaagatcccaaggaactaatyctagctctacctctactagctgtgagatctttagcaaggcacttagcttctctgttctttggtctccccatctgtaaaatatgagcattatgtatatctc

SEQ ID NO: 2694 - DNA, 201 bp, Homo sapiens
cctttgaccctttcaatctattcttcacaaagcagccaaagcgatctttctaaaatacaaatcagatcatgtcactgctctgctgtaaatcctaccaaggsttcacattccaagtagaaaaaaaaacccaaactctttcctgtggcttacacaaaaccctacatgatctagcccctgcctacctctgggaccttatctctt

SEQ ID NO: 2695 - DNA, 201 bp, Homo sapiens; identical to SEQ ID NO: 1364

SEQ ID NO: 2696 - DNA, 201 bp, Homo sapiens; identical to SEQ ID NO: 1528

SEQ ID NO: 2697 - DNA, 201 bp, Homo sapiens
catgttgcccaggctggtctcaaatccctgggctcaagcaattcctcctaccttggcctcccaaagtgccaggataacaggcgtgagacacacaccaagcycctacagtatctgtataacataagtcttcctgtcaattctctactcacaactttctgtgagccctccatttcatgcaggataaaaatgcaagtcatgacc

SEQ ID NO: 2698 - DNA, 201 bp, Homo sapiens
gaactagttcaattaaaatgctacaattattgcacatccaaaattttttatctgattataaactttctgaaaaactgcactgcaaattcctaaccaaaacycagttgaaagtcatggcaatattgcaaaaaaaaaaaaaaaaaaaaaaaaattccactcttcaattcacaactaactacaaactattttgatataaaatta

SEQ ID NO: 2699 - DNA, 201 bp, Homo sapiens
gcaaggccactgctgtaacccttgggcctagcagagtgcctggcatgtgaaagacattcaagaaatatctgtgagactaagcaggactgctttgttaaggmgtcccaggtttgaatatagggctatgggactctggattccccttaaaatctattttagtgtctcacaaaacttttcgctaaactcaccttttcaaagtca

SEQ ID NO: 2700 - DNA, 201 bp, Homo sapiens
cacagggaagcagctgaccctgacatcttcattggatgtctcatggacagaacaaacttggcacttcctaaacaaaattcttggttcccttactttcccaygaaattgcctccctactttggcctttttcccttcttggtaaatgacacaatgtctacctggttattctggatagaaacccggtggccacttttttttttt

SEQ ID NO: 2701 - DNA, 201 bp, Homo sapiens
ctactttttcttaaaacttttaaaaacgtagattataaaaacattttggtacatgcactattttggaacaccaaagtggggtagattagataagctctaaratccttccagctgcaactctaccagaccatgtaatggaaaaacaacgagatggcacagcggcacaagctgcttcctgcccttcctgaggcccactgtcaa

SEQ ID NO: 2702 - DNA, 201 bp, Homo sapiens
taaaaacattttggtacatgcactattttggaacaccaaagtggggtagattagataagctctaagatccttccagctgcaactctaccagaccatgtaayggaaaaacaacgagatggcacagcggcacaagctgcttcctgcccttcctgaggcccactgtcaagaatgagattggacagaaacgcccagtggagaaac

SEQ ID NO: 2703 - DNA, 201 bp, Homo sapiens; identical to SEQ ID NO: 1371

SEQ ID NO: 2704 - DNA, 201 bp, Homo sapiens
tccacacaaggcactctaatattttcgaatccattctatttcattatttaaaaagttagtgggacacattaaatttatttcttgacccactaaagggtcaygagcaaagtctcaaaaacactactgtaagacactaaactattaactattgcaagggagtttgtaaaaaatacaataaacagaatagcttacctctctgca

SEQ ID NO: 2705 - DNA, 201 bp, Homo sapiens
tatccctgcctatcaaggtagccagaggtttgccatggtactgaagaaaatgatcagcagctgaattagccaaggttcatgggcaaagatgaggctggcarataaagccagacaaattcctggttaaaagtcacctcctgagctatttagagaaacagttgattcagggctgggataggaacgggatcagctgagcttgga

SEQ ID NO: 2706 - DNA, 201 bp, Homo sapiens; identical to SEQ ID NO: 1373

SEQ ID NO: 2707 - DNA, 201 bp, Homo sapiens; identical to SEQ ID NO: 1374

SEQ ID NO: 2708 - DNA, 201 bp, Homo sapiens; identical to SEQ ID NO: 1375

SEQ ID NO: 2709 - DNA, 201 bp, Homo sapiens
actactgtaagacactaaactattaactattgcaagggagtttgtaaaaaatacaataaacagaatagcttacctctctgcatgcagaatgttttctttgmtaactttatttttcaaggctggatttataccacactgggcttgcaaacttgctgcttcatgggttggtggggaggggtaggagaggggtgtgtggggtat

SEQ ID NO: 2710 - DNA, 201 bp, Homo sapiens
aactttatttttcaaggctggatttataccacactgggcttgcaaacttgctgcttcatgggttggtggggaggggtaggagaggggtgtgtggggtatayatgttttcttttttattttatggtctttttaaaaaattgagatataattcatacaccataaaattcacactattaaagtacaattcagtggtttttagta

SEQ ID NO: 2711 - DNA, 201 bp, Homo sapiens; identical to SEQ ID NO: 1545

SEQ ID NO: 2712 - DNA, 201 bp, Homo sapiens; identical to SEQ ID NO: 1377

SEQ ID NO: 2713 - DNA, 201 bp, Homo sapiens
ctgagcttggaacatcttgtaataccagaaagcaggacactatcaaagactattggggttgtgttaacaggactcagggctaacttgaagagaggcttccrctggccagaaatgggacaatttgagctttgataagaaaaataatttcaatgaactgaaaaccatcaaatgagtttaaatccaagagttcacaatacttga

SEQ ID NO: 2714 - DNA, 201 bp, Homo sapiens; identical to SEQ ID NO: 1378

SEQ ID NO: 2715 - DNA, 201 bp, Homo sapiens; identical to SEQ ID NO: 1379

SEQ ID NO: 2716 - DNA, 201 bp, Homo sapiens; identical to SEQ ID NO: 1381

SEQ ID NO: 2717 - DNA, 201 bp, Homo sapiens
gaatgcttggacaggctcagtatgttggaacaacttctaatttaattctctaaggatgtaaaaaaaaaaatcttggttagattggccaacattgatatgaytggccaatttcaatatgctaaagtaaatgatgtggtcagctgtaatccctgaaaatttgttttcaagaagttgattatcactgtttttcccccaacatat

SEQ ID NO: 2718 - DNA, 201 bp, Homo sapiens; identical to SEQ ID NO: 2372

SEQ ID NO: 2719 - DNA, 201 bp, Homo sapiens; identical to SEQ ID NO: 2373

SEQ ID NO: 2720 - DNA, 201 bp, Homo sapiens; identical to SEQ ID NO: 2374

SEQ ID NO: 2721 - DNA, 201 bp, Homo sapiens; identical to SEQ ID NO: 2381

SEQ ID NO: 2722 - DNA, 201 bp, Homo sapiens; identical to SEQ ID NO: 2397

SEQ ID NO: 2723 - DNA, 201 bp, Homo sapiens; identical to SEQ ID NO: 2398

SEQ ID NO: 2724 - DNA, 201 bp, Homo sapiens; identical to SEQ ID NO: 2401

SEQ ID NO: 2725 - DNA, 201 bp, Homo sapiens; identical to SEQ ID NO: 2403

SEQ ID NO: 2726 - DNA, 201 bp, Homo sapiens; identical to SEQ ID NO: 2404

SEQ ID NO: 2727 - DNA, 201 bp, Homo sapiens; identical to SEQ ID NO: 2405

SEQ ID NO: 2728 - DNA, 201 bp, Homo sapiens; identical to SEQ ID NO: 2413

SEQ ID NO: 2729 - DNA, 201 bp, Homo sapiens
aggggagatggggatgctgcttagatgaggcgcatatggaaagggaggcagctcgagcttggcagttatggatctttgagccacatttagagttcatcccyatccccatcagtccaacaccttcatatccaccgatcaatctacacctctctggttcaaaggcatcgagaaaaaatgaagcacctcactttctgcactctt

SEQ ID NO: 2730 - DNA, 201 bp, Homo sapiens
gtactttaaaaaggttatctatttgtgctgagggaagaggtagaatattagggaaccaataagataacttctcttttggagaggtttccaaagtccttctrtcctcagaaattctcatgttcctccccagggacagaaaaatcctccttgctgtctaatctccatctctcctattgcaatgctagccactccctctgccct

SEQ ID NO: 2731 - DNA, 201 bp, Homo sapiens
ccaggtgatcccttcaatcaatcagtagctgtctgtgttttgattgattctgttccctttgaaacttcttcccctaccagtgataatgcctaaaatgtatygattactttctatgagccaagcactgttctgcttatcaatgctgtagttatctaatattccttcgttagtaggtagcagggctgagatttatgcttagac

SEQ ID NO: 2732 - DNA, 201 bp, Homo sapiens
agcacctactatgtaccagaaactatgctgggaactggagataacagctaacacatagacagcacttattacattccagacactatttcaagcattttgcrtatatcaatttatttattcctcacaactactcagtgaggtaggtgtgctattattccccacatttcactgatgaggacactgaggcagagagaggttaag

SEQ ID NO: 2733 - DNA, 201 bp, Homo sapiens
cttcacctccgcgctggcgggtgaggcgcgggacgaaggcagggtcttggggaggggtctgaaaaatgtgggggacgaggagtggacctcagcttgagatmagggcagggtctccgggtccctccaaggcaccgcccccccatcagcccgcccgcccgcccaggctccagctcacctctccaaaccctccctgcacttttg

SEQ ID NO: 2734 - DNA, 201 bp, Homo sapiens
attagatatggcccaagtgaaaacctggagcttgtctgaattggacagccaaggagagaggcagaagaggattagtggaaaaagcagaaacttctaggctygactcaatgactgtattgtgcgtgatttggggcaagccaccttcctctccatctcctcctctagtaaatgttcagcatcctgaggtctccagttctgaaa

SEQ ID NO: 2735 - DNA, 201 bp, Homo sapiens
catcacgtctgtggacgacgccatccggaagctggtgcagctgagctccaaggagaagatctggacccaggagatgctgctgcaggtgaacgaccagtcgytgcggctgctggacatcgagtcacaggtggggcccagcgccacgggggacagggagcacagtgggtagaggcggtggcagccaccggctgcagcccggat

SEQ ID NO: 2736 - DNA, 201 bp, Homo sapiens
ttaacagaaaatgacaaaccaggaatggatgagggaggcgccagcacagcagcgggatgtcttttgatttgcttctgttatttgcatgtctctcttgtgaygtctgtgaaatgtttagaatgacaaagtttttaaaagacctgctgactccgcctgaaaaatgtgaaaaacctcccatttagagacctattatgtccagct

SEQ ID NO: 2737 - DNA, 201 bp, Homo sapiens
agatgatctgcccaccttggcttcccaaagtgctgggattacaggcgtgagccaccatgcccggccttatccccatcttaatgatgatggaattgaagctyaaaaaatttaagtaactaacttgccccagatcatttgtctagtaaccagtggagctgagctatgaacccagaacccaggattgactaactccaaaaaatg

SEQ ID NO: 2738 - DNA, 201 bp, Homo sapiens
gtgggaattcactgtgccaggtgtttttcatccatagacgaaggaaaagcaggttgggttcccagagacttacagcaaaaagaaaaggacatcatagggarccagtctgtgtagcagagaaaggccagcctttgaatgagaaggcttgatctgatccaggaactaccacttatgcggcaattttgtcccttgcttgagcct

SEQ ID NO: 2739 - DNA, 201 bp, Homo sapiens
ttgtggttcctttgttaaaaataaataaataaattgaccatgtattaatatgtgcatatctatctctggattctctattctgttccattgatctaaggtartgtatgcccttcaactttttctttttcaagattgttttattcattcaaggccctttgcatttccatataaaatttagaataaactggttcatttctacaa

SEQ ID NO: 2740 - DNA, 201 bp, Homo sapiens; identical to SEQ ID NO: 1449

SEQ ID NO: 2741 - DNA, 201 bp, Homo sapiens; identical to SEQ ID NO: 1450

SEQ ID NO: 2742 - DNA, 201 bp, Homo sapiens; identical to SEQ ID NO: 1459

SEQ ID NO: 2743 - DNA, 201 bp, Homo sapiens; identical to SEQ ID NO: 1963

SEQ ID NO: 2744 - DNA, 201 bp, Homo sapiens
tgcttgcttttctttgcccccaactaccaaattagaggaagtatggtaccagcagtaattgttcttttcaaattagtaaaatagtaattctgaagaaaagygttatggatatttttcatctcttttttcccttgtcacgtgatggtatcttccctgttttctttcatggatgactgctgctaccacaggcctgacaatctc

SEQ ID NO: 2745 - DNA, 201 bp, Homo sapiens
tactgtatcttgtcatttattttcttcctgaatattttgttagactaacacattctagaaaggataggaatgatgggtttttttctattttctttgcaacyctccttagcaactagtatgagtttgctcattttttttttctcacaggtctgattgaatgattttttttaaagctcatgaactcaccaagtagaagacaat

SEQ ID NO: 2746 - DNA, 201 bp, Homo sapiens
taatgtgttaggctgactaccaaagtttcatctagtctctttggctcctattttcacgttcagcaatattgtaatcaaaaatgtcactttccagtgaaatragcctggattgtatttttaaatccacaggtctccatatttgataacttttatatgaagttttaaacatgttttttctgcagtattgtggttgaagaaatt

SEQ ID NO: 2747 - DNA, 201 bp, Homo sapiens
cattttgcctttataatagtttggttgaagttttaaattcatgttgtcacatatacatgttttcttgaaagagtttgccaactttttctagatcctcttaycataactctttttgtgctccttcatgatttttttgtgctccttcatgattcccattactttaaaagcatttagaattggcctgttgtttgtccttgtctt

SEQ ID NO: 2748 - DNA, 201 bp, Homo sapiens
tgtaacacaatctgtaaaagcaagacatgtggtcttgaaaaaagatgagcatatccaaggctggctgtcaaaatgcagtttgagtataaattgtttgactmtttgaaaaagcctggagatctcacttaaaccaacaaataattatgctttatggagtgcgcaaaaccaaatcagaattctgaaatttgctgtcaattctct

SEQ ID NO: 2749 - DNA, 201 bp, Homo sapiens
tctgaaaaagcaggggcctccatgactctgctccaatattacagtcagtgctcatgcacgacaagttgttaaaatacttttaatatcacttccttttgagrttcccaaagggcttatttgcctctgctggtctgacatagtctaggaacagcctgtctatggtattctcacaaataaaggacagtacatcatcacgacttt

SEQ ID NO: 2750 - DNA, 201 bp, Homo sapiens; identical to SEQ ID NO: 1966

SEQ ID NO: 2751 - DNA, 201 bp, Homo sapiens; identical to SEQ ID NO: 1971

SEQ ID NO: 2752 - DNA, 201 bp, Homo sapiens
gccaaaccaacctttggaacctccagtccaatctcattctgttctacattccagcacccctctcaggcttccctgaagatcatcccccaagaacctcttcyccagtcttctcttcggaattctcatcattcttccaagttcctttcctatttctctaaaatcactgataaattatggtttctctaagaagcaattttggat

SEQ ID NO: 2753 - DNA, 201 bp, Homo sapiens; identical to SEQ ID NO: 2071

SEQ ID NO: 2754 - DNA, 201 bp, Homo sapiens
taagtcttccttggataccatctcactgctccttgctcttctgaggacaagtatggttgaaaaattctttggtaattctgtttagtgttttgtcaagttcsagaattaaagttcattgcgggtggaggcagtattttctaactctttgtcctctaccgggctgtgcatatgggaagtactcaatacatttctttagtaaat

SEQ ID NO: 2755 - DNA, 201 bp, Homo sapiens
attgttgctatggttttaccttttacagatatcacataattggaatcatacagtatgtggccttttcatactggtatctttcacttagcaatggtatacaytgagatatatctatgtctttttgtgacttgacagctatgtcttttcattatttcattttatacaatgtgccattgtatggatataccactgtttatccat

SEQ ID NO: 2756 - DNA, 201 bp, Homo sapiens
ccatgtctgttatgaatggaaaatgcattgatggagcaagtattgaggtaacactagctaaaccagtaaataaagaaaacacttggagacagcatcttaayggtcagattagtccaaattctgaaaatctgattgtgtttgctaacaaagaagagagccacccaaaaactctaggcaagctgccaactcttcctgctcgtc

SEQ ID NO: 2757 - DNA, 201 bp, Homo sapiens
ccacacacttttgattaactcttctcgttttccaagaacgagaagtgtagtggctgtagtgcagtctgtcactaaaatgaattgctgcttaaaaacaaackgaaaacctccattgacctggcaaccattgacctggcaaccatggtttccatgtaccatactcaatgacaacagtgctaacaaatcaggagtttagtacca

SEQ ID NO: 2758 - DNA, 201 bp, Homo sapiens
ctttctggtgtttgcagagatccccttctattttctcccttgtatgccaagtatctttcgacacttctttttagtcacaaacacctttacattgcttatcrtcttccttcttactcatttgggtcaccttttcccataagctcaaataatcttaaaacaaatccaatttggaatctgttactgaagaattctagctgataa

SEQ ID NO: 2759 - DNA, 201 bp, Homo sapiens; identical to SEQ ID NO: 1143

SEQ ID NO: 2760 - DNA, 201 bp, Homo sapiens
gagcctgttttcttatctgtaaaatatgaatactagcaatgtattaggctattcttgcattgctataaagaaatacctgagactgggtaatttataaagaraaggggatggtgctaaaccattaatgagaaatctgccctcataatccagtcacctcctaccaggccccacctccaacactaagggttacatttcagtgtg

SEQ ID NO: 2761 - DNA, 201 bp, Homo sapiens
ttgggagaaggatggacagggttttcatcaatcctctgaggccttggaaagcagcttgatgatatcagatgctctcatttgaattgatatattggagaatkatttcattgcctttagatttaatcagaatttttctgtaatgatttttaattttagtttttttattctgaaattatttataatgagttttctatgacaaaa

SEQ ID NO: 2762 - DNA, 201 bp, Homo sapiens
tccaaagtccctgctaattcctcactgttgtagtatatttaaaaattaaaaatatactttaacaaaatttaaattggtagacattcattagttccttgaayatatggagaaaatacattaggagttaatgtggaagaaatcaccttgaggttgggaataaggagatctgtgttactcggtgaatattctgggcatgaagtt

SEQ ID NO: 2763 - DNA, 201 bp, Homo sapiens
cagcagctttgcagtgacaatacggtttcttaaatatggtggctattttgcctctggtgtctcttccagagcttgctaccaggatagcgtgagtccagtargcgtaccaagtccttcaatactactagtctcatggggaggaaaacaaaaaccagtcccacacaccaagcaattaagtgctcactgtgttgtttttacggt

SEQ ID NO: 2764 - DNA, 201 bp, Homo sapiens
ccaggaatacaaaccaaagcatgttttataaatgaacacctctttctctgaaatcagaacttagaaaagtaaaataactgttcagttataattagcaatcrtactgataattctgaggttttacatcattcaagattccacctgaaagattcacttgtctttccacctgaaagattcgcacagatcaatctgtgtgtgtgt

SEQ ID NO: 2765 - DNA, 201 bp, Homo sapiens; identical to SEQ ID NO: 1145

SEQ ID NO: 2766 - DNA, 201 bp, Homo sapiens; identical to SEQ ID NO: 1146

SEQ ID NO: 2767 - DNA, 201 bp, Homo sapiens; identical to SEQ ID NO: 1148

SEQ ID NO: 2768 - DNA, 201 bp, Homo sapiens; identical to SEQ ID NO: 1149

SEQ ID NO: 2769 - DNA, 201 bp, Homo sapiens
tgcttttctcttagcctggaatgccctcctcccagatctttgctggctgactcttcttgttatttagactgactttctcctcggctgccctctctgtaatwgcgatcaaccagtcactttccttcccaccacccctctcaattttccctttagtgtttgtctctctttgaaattattctttccattgatttgcttgtttat

SEQ ID NO: 2770 - DNA, 201 bp, Homo sapiens
tatgggattctcactacaaattctggaaatagtcacctgcacccttcagcacattcattagccaacatttctaaaatagggttagtcaatttggctatttkcctgagtttccagattccttatagagtctgtcagcttacccaagttgacagactctataagtcaataaactgatagctgaaacaaaacaaaacaaagaaa

SEQ ID NO: 2771 - DNA, 201 bp, Homo sapiens
agtggctcctcggggcactcctgtacttccttggtcttaaccttgggggcctatctggttagccaggggcttcttgcaggccttctctgccttcagcttgyggatgtgtttcaggagaatctgcttgattctcattcacctaaaagataatgtaatttttaagagaaaaaaagtcagatatgttatttttctttgagtacc

SEQ ID NO: 2772 - DNA, 201 bp, Homo sapiens
cctctgtggctttgcagggtacagactccctcccagctgctttcatggattggctttgagtgtctgtggcttttccaggtgcatggtgtaagctgtcagcrgatgtaccattctgggctctggaggacagtgaccctcttctcacagctccactaagcagtgccccagtagggactctgtgtgggggctccaaccccacat

SEQ ID NO: 2773 - DNA, 201 bp, Homo sapiens
caaacttttacactcttcttcccttttaaatataacctacaactttaagtcatgtttttgctcctgcacttgaaatagcttgctagaagcagccaggccayatcttgatcactttactgcttataaatttcttccaccaaataccttaagtcatcactcttaagttcagactttcacagtttgaacttaagttccctaggg

SEQ ID NO: 2774 - DNA, 201 bp, Homo sapiens; identical to SEQ ID NO: 1150

SEQ ID NO: 2775 - DNA, 201 bp, Homo sapiens
ctagaaattacttgttttaaattgccactaatatgcctaacctcatttcagataatttaaccttaaacacatgtatttagaattaattactaggaattgaraaggtaccgacatgaaaatgaagaatgaggagaatctttttctggagaaataaaagagcagcaaaaaatagtaatcaatataacaatcacagttcccgag

SEQ ID NO: 2776 - DNA, 201 bp, Homo sapiens; identical to SEQ ID NO: 231

SEQ ID NO: 2777 - DNA, 201 bp, Homo sapiens
ctaagctatagactatgtacgtcataggcagttgaattttacccagtgacattaggataattaactcaccatctctgtctgtattgaccaaattatgtaamctcatttgtgtagcttgttgtagcttggcttcacataatatttggaaagcctcaagatccttgttaaattattaaatttgatgataataaaaattaaaaa

SEQ ID NO: 2778 - DNA, 201 bp, Homo sapiens; identical to SEQ ID NO: 232

SEQ ID NO: 2779 - DNA, 201 bp, Homo sapiens
ctgggcctgatggagccccagggaaatcactaccgctgccggtgtttgcaggtagcagggagccaggcctgggcgaggtgtgtctcgatgccagagctggyagtacagaaggtggtgggccatccccggtgctgctcagcgtggtggatcatttcaaccgaatcggcaaggttggaatccagaaatgcgtcattggtctgt

SEQ ID NO: 2780 - DNA, 201 bp, Homo sapiens
acattatcactgaatgtctatctacccttgaacaactcagtgtaaacagtcctatgtcaatggcaaaaattgttactagagaaattcagtttttcttccakgttgatagttcattggtttgactaaataatataaagaaaaaaattaatcttaagaatctaatcttcaaacataatcttacctgtcctatgaggtaatttt

SEQ ID NO: 2781 - DNA, 201 bp, Homo sapiens
cagtataaagattgcagaaactaagaatgaggaggcatattttctttttttcactactaagaaaagagtcactgcctttagcacagtgactttggatttcwtccttatgctagaactaagcaatattcaccatttcattcctccttctgctgctttttctatcttagcctcttgggcaattcatgctataggatattaaca

SEQ ID NO: 2782 - DNA, 201 bp, Homo sapiens
gcagcataaactaagtgcctaggggcagctgaaactaaaaaagcaagtaataaccaaaaaaggattgagccagtgtgctactagctccagaaggcccatgrtacaagacacagaataagaaggaacaagagattatgatctcctaaaaacagaaaccagaaaatcccactatttagaaatttacacacagaagtccagaga

SEQ ID NO: 2783 - DNA, 201 bp, Homo sapiens
tacagtcagcaaacataaccaaaccacaagtattaaaaggtctgggaaaaaaaggagtcacaactgccaagcaaagaatacacttcattcatatcacactycttgccaaacaaaacaaacgttcttggaagttgtgtaaaacccattttgttcaatcaaatcatattttaaatatattgtgggtcattaaagaaaactgga

SEQ ID NO: 2784 - DNA, 201 bp, Homo sapiens
ccataaacatccattttatgggacaacttggatggtttcataccacaaaataatttgttaatgaatacagaatattaaaaggtgaaaatcgggacattaakaacaaagtgtgtgagtaaaagtattgaattttttaatgcaatcgaagttatcagcttaaaataggttgttacaactataagatgatttatgtaagcctta

SEQ ID NO: 2785 - DNA, 201 bp, Homo sapiens
cttataagcacaacctacaattggtacaggggacctgatcacagtgagctcataatatggtacttgtgccaagcagaaaagcggtattgtgcctcaattartttcaggatgccaaaaccaacatggaaagaaaaaattcagtacatttgtaacattccctgacatgccctttactactcttaagccataaaactaggagaa

SEQ ID NO: 2786 - DNA, 201 bp, Homo sapiens
gcttccagtgttgagttcatttatatttaatgtaattatttatggttctatttagtctgtcattttgctattggttttgtcacagctcttctttgctcctygtttttccttccctgccttattttatgttcactgaatattttatagtattccattttaatccttctagttacacatccttctagctatacctagctatat

SEQ ID NO: 2787 - DNA, 201 bp, Homo sapiens
acaggaataggttaaacagaaaggtagggagccttttctgggaactctaacacctccggtgagttctcaccttaccttttgttagagaggagttgggaccrttcatgctgggagtcagatgtctggagaaatggcttcgtgtgatcgagtgaattcactgctggagaatttacctgttggccccagaaggagtttcacagt

SEQ ID NO: 2788 - DNA, 201 bp, Homo sapiens
gtctttgaagccaaaggaaaaatgagagacagggctttctactcgctgagcaggatattgctaccagtagaagctacccaagagatcagaaaagagggtasagaaatagccaggggttctgagcctcacagctgaaaggagagcttattctcatggggcagatacacaagggctcagcacagagccagagcaatgattgag

SEQ ID NO: 2789 - DNA, 201 bp, Homo sapiens
agcagtggagagactttccacgaggtgcccttcatggtgggaaagcagagatccctgtgctgggtctagtgaggaccgatgtaggaccagaggtagccacmaggtggcaggctctgcacgcttttcttcagagaacagtaaccaattctcaaggctcctgctgagtggttcctggtgcagcctggagaagggaaggagaaa

SEQ ID NO: 2790 - DNA, 201 bp, Homo sapiens
ggaggaatgatggttggtttctatggatttgttacaggggaagggatatctcagctcaaaggatatcctgcgtatccaagccttcctccacttgtgccccrcacactgtcccctctactttctcaaggaagtttttcctgcagctctgctcccctctcccaccacagcatcagtttccctctctatgcatgtttcagcacg

SEQ ID NO: 2791 - DNA, 201 bp, Homo sapiens
tcagaaactgcatctttcttttttttaaggagcaggattcctcttgcacatgaaatctttcccagagccccaatctgaagcctacttaagagtggagctcwggttgaagtaggggcagagggctcccatttccaccagcccagagagtgtgatttcaagagcccttacccgtaattctgaaatggatgcccttgtctaagt

SEQ ID NO: 2792 - DNA, 201 bp, Homo sapiens
cctctaatttcccccacatgatggcagccttgattctgagactgaaaactattaaactcatttttcacccctaaacatctcactgacagatggctgcatgmggaaggagctgggattatgtgtcctctcaagatatttctaaataaattcgtgtcctccggacccaaaatatacagtgtttttcatgacagttgacttcac

SEQ ID NO: 2793 - DNA, 201 bp, Homo sapiens; identical to SEQ ID NO: 2078

SEQ ID NO: 2794 - DNA, 201 bp, Homo sapiens
cagtagcacaatagggtgatagagttaacagaaattattgcgtatttcaaaataattaaaggagtggaattgggatgttcctaacacaaggaaatgataamtgcttgatatgacggatactctaattaccctgatttgatcattatacattgcatacttgtctcgaaatatcacatgtactccaaaaatatgtacaactat

SEQ ID NO: 2795 - DNA, 201 bp, Homo sapiens
gcctcccaaagtgttgggattacaggtgtgagccaccgcgcccagccccgtatttccattttatccccactttctggatctaaaagagccctactctccamattgttgcctggagggatggttaatgggtacaaaaatacagttagatagaaggaataagatctaacgttcagtagcacaatagggtgatagagttaacag

SEQ ID NO: 2796 - DNA, 201 bp, Homo sapiens
gataataaattatggtgaaattcaacaaaaatgttaagagcaattaatctggtccagtgatgctcaactttaacatgcatacaaactacctgaagagcatkttaaaactatttcctggatctcatatttagagatttgattcagtaggttgagatgggctcatgaatatgcatttctgtctagcttatgggtgacgccgat

SEQ ID NO: 2797 - DNA, 201 bp, Homo sapiens
gctggtaaatactatcttataacccatcatttaaaattgatgacacttaacactaattgcataaacgaagaaataagcaaaaagaagactgataaaaaackatacactttgactttacccccctgctatttaactttttgttgtttctttatatcttattgtatgtactgtctatgtcttgaaaagttgttgaagtaatta

SEQ ID NO: 2798 - DNA, 201 bp, Homo sapiens
tttaactgaatttactttaaataaccaatgacaataaaaccaggagtgccgcaaactgtgatgacagggaaactatctttcaatttccaattctctataaytggtattttataaagaagggacagtggaagtgataagccccagttacaggcaacaaggggatgcattgtttgtagacttttaaaacaattataaagatga

SEQ ID NO: 2799 - DNA, 201 bp, Homo sapiens
ctaccatcagtgggcaatgccattctagaataaggatgctcatggagtcaggtttaaataccaaatttgctcttatgagttgagtgactctaggcaggttyttacattctctgggcttcgtctgtgaagtgatgcaataacacatacatcacaaagtgatattcacatcaatggcatacagtacatggtaactgcattatc

SEQ ID NO: 2800 - DNA, 201 bp, Homo sapiens
gttttaaaacctactgataatttctttggggaatcctttcattattctgaagcttcaaaagttgtgtcttatcctgagaaaataaggatagccacaatcayggcaaaaactcacttcactgagcatttactatgtgccaggcatggtgctaaattcttgtacttgcattacctcattgaatcctcacagcaaccctctgag

SEQ ID NO: 2801 - DNA, 201 bp, Homo sapiens
cttgaagataaactataaacccctccaccacctgccaaaccttagctattccaaatggaggcagttctaacaagaggtagcaaggccttggaatagtctckttagggatctttaatgtttccccttattggtaaacaaactcaccaacttagaatatctaccttgtggctaagaattcactggaacagaataataatgcca

SEQ ID NO: 2802 - DNA, 201 bp, Homo sapiens
atctggttaagatgatgccacacattgactggaagcatctccattttttagaaggaaaagggaataggaactcatatttattgactgccctaccttgagcycagtgatgtgctggtaaatgtttaaagccggctcttttctgcaattatacaggcagtaagggaaaaaagctttttaaaacccagttcaaggttggggcgg

SEQ ID NO: 2803 - DNA, 201 bp, Homo sapiens
gaggctggcttatttctcttagcacaatgcattttaaattcttccttgttgtgcctatcgatactccattccttttttattgctgagtaatatttcattgwaagatgttccacgatttgtttattcattcaccaatggaagaatgtttgtttccagacatttgagattataaataaagctgctatacagattcatataaag

SEQ ID NO: 2804 - DNA, 201 bp, Homo sapiens
gcacacattgtttatgcccaagtataagaaagtatttatttttcaaagtcatcctcaggaaaaaaaatagttgtgttattcaatccttttcttattttccrtctctgtcttttgttttactttctgtgaggttttcacaatttgaccattaggtccttttatttctttatctattgtaacgtcatatggtttttcttctta

SEQ ID NO: 2805 - DNA, 201 bp, Homo sapiens
cacaacctgatagtcaaggagcatctgtacttcttacaggtaagaccagataaagatatgttttttacactctttctgcaatgctctttactactggagcrtttgtctctataaaggatatagagctagtccatggtcatcagcaacttgtgatatcaaaagtgaccaaggtcattagtgagtatattaaagattcccaaa

SEQ ID NO: 2806 - DNA, 201 bp, Homo sapiens
tttttaatggagttgttttcttgtaaatttgtctaaattccttatagatgctagatattagacctttgtcacatgcatagtttgcaaatattttatcctaytctataggctgtttcctctgttgataatttcttttgctgtgcataagcccttaagtttaattaaatcctatttgttaatttttgcttttgttgcagttgc

SEQ ID NO: 2807 - DNA, 201 bp, Homo sapiens
tatttttattgagtttttctgaatatttttgatctgcagttggttgaatccgtggatgcagatggtcaactatgatttttttcttgttacttcatatatcrttgtaatcagcccaaaagtaaagtatagagaaggcagcaaagttaaaacatttgaatgtattttaattttaatgagaatgattttagaaaatatacagac

SEQ ID NO: 2808 - DNA, 201 bp, Homo sapiens
tcatagacctttaatgaaaaggacacaaaatcacagctagataggagtaagttctagtgttctataacactgcaggatgactatagttaacagcaatataytatatagtttcacatagctagaaggaagacattgaatgttccctacatgaagaaataatgtttcagaagataaatatgctaattaccctgatctgatcat

SEQ ID NO: 2809 - DNA, 201 bp, Homo sapiens
tgtctgcagccaccttacattgcagcggtcagagaggaaaacagcaatgaagagggttagaaaagccacatttgatgaccacctttgtaataactgactcrggcaagaattgtaagtggatgctaaaatcatggagtgaaggattgctggcaatcagtgtatttacacagcctcagagtgtctccccacagatcacttctt

SEQ ID NO: 2810 - DNA, 201 bp, Homo sapiens
ctgtgactgtggttgtatctacaaacaaaacactgtgaaaaaaggtgacatatcctgtaactcataggagaaaaactcatcacatcagtcagtttgctaaycccttgtgagcttccttacctgcccagtccaggaattcaacacactcagtctgagaatatctagcagcaacatctcgagccctttcttcccggaagttca

SEQ ID NO: 2811 - DNA, 201 bp, Homo sapiens; identical to SEQ ID NO: 2805

SEQ ID NO: 2812 - DNA, 201 bp, Homo sapiens
agcaggccaggtcttcgtgaactgcagcgacctgcacacggacctggagctgagcagggagaggacgtgtgagcagcaactgctgaacctgagcgtgtcarcccgtggcccctgcctctcgggctgcgcctgtccccaggggtaagtacccatggtgtcgtgggcccgtgatcctgaaggctggcagaaccaagggccaca

SEQ ID NO: 2813 - DNA, 201 bp, Homo sapiens
cataactgtggggatgagggagacaaagcatgcaccactcccccctcactgcagcactgtcctgtgaggcctccaaggagtatagcccctgcgtggccccrtgtggacgtacctgccaggacctggccagccctgaggcctgtggggttgatggtggcgatgacctgagcagagacgagtgtgtggagggctgtgcctgcc

SEQ ID NO: 2814 - DNA, 201 bp, Homo sapiens
atttttttataggaaccagtgctcctgccacttccagggagtggactatccccccggagacagtgacatcccatccctgggccactggtgagctccgtagrtagcagccttcttgtcctctctttaaagggaggctgctgactgaagacagtgcagctgatggaactttctgtgaagggacacccagccctgctctgtgca

SEQ ID NO: 2815 - DNA, 201 bp, Homo sapiens
aggcagatcagaagtagccagaaacaaaacaaagtcctctcatattctatttgcttgtgagaaaaaatttaaatctaactggaagaaacacatcttcaagrgcttctgtaatttttaactcacaaaatctaaagttcaatacaaagtgacccaaatgatcaaatgccaagaggggaaaaaatacaatacacacactcaaag

SEQ ID NO: 2816 - DNA, 201 bp, Homo sapiens
gaactcctgggctcaagcaaatcatccacctcgacttcccaaagcgctgggattacaggggtttgtgagccatcgcaccaagcatgaacaggatatattayatcttcaatacaccatgaacaggataaacaagataatatatcattagcaagatactatatcaaaccagtctgggtttattccagaaatgaggtttaatat

SEQ ID NO: 2817 - DNA, 201 bp, Homo sapiens
cattattccttcccatcatattagatcctaaatctagttcactgaatctatcaaatgtctaaggttattatctagctgactggccaagactcaaaaatatmaaaagtaggagtaatcagaaaggaattagaatcagacaaatgaagtaagtgtacaagtgactaggcatatcatgatgatagcaaatgatacagtaaatgg

SEQ ID NO: 2818 - DNA, 201 bp, Homo sapiens
ttaattcacatcaagcactgtgttaagtattatgaaaaatctctccacctcctctgaaccaaaaaaaggctctaagaaattgagaaaacgaaagtcagtayttacatagctgaaaaaaaaaggtgaagtaaatacacgtgccaaaataaggttattatgcaaaatgtgtggttagtcaaagaatgaaatatctactagtaa

SEQ ID NO: 2819 - DNA, 201 bp, Homo sapiens
atagcaggggagctaagccttactgcctaacatttctggaacacctctcattattggtatgctgcagcatgatagaagaatctcttaacaagtcataaaartcttccagttcaaccacttctgaagaatgccctcttcaccagctctaacagttagtaaggtaagttcagcatatgcttgtatacttgtataatttcactg

SEQ ID NO: 2820 - DNA, 201 bp, Homo sapiens
tcataaacccaccccaaagaagccaagttagaagcttaaagaaggctaattggcttcttacaagcccaaagtcaagccagataccaacttttcaacttagytcaaataaacaagtgcttactaaaaatttatttgaaatgacctgagatgttacaaagaatactagccaagagtaagatacgtaacctccaggctcacaat

SEQ ID NO: 2821 - DNA, 201 bp, Homo sapiens; identical to SEQ ID NO: 1982

SEQ ID NO: 2822 - DNA, 201 bp, Homo sapiens
gcttgtgatatataccaaactgcatgaagcacttatctgaagtgtacagtgattcaagggaacagaaacatagagacggaatgcaaaagaagctctctctmtatatatataatattgctttgagtattttatatatgcatgtatacatatatgtatacatatgtacacacacacaaatacagaaaatacttataacaatac

SEQ ID NO: 2823 - DNA, 201 bp, Homo sapiens
aaagacagagagagagagagtgtgtgttataaagactaaaaaggggaaaatgaacctgtcattattcacagataacttgtttgcatgctttgaaagttcaraaaaagctaggggtaaactataaaatttaatagaaatttagcaaggtcactggataaaaagtcaataaacaaactcaattctattcctgtataccagaaa

SEQ ID NO: 2824 - DNA, 201 bp, Homo sapiens
aattctctgaaacttaaatttttaaatgtatttttaaacttaaaattaacttttagcaaaagatcaattcatcatttaagatttattatgttcatattttyggtatctctgtgggtccatacacctggatatggatactggctctctaaatagagggttacgtgaccttggacaagtaacctctatatgcctcaaatcttc

SEQ ID NO: 2825 - DNA, 201 bp, Homo sapiens
agcagaaggaaataaacaatactcaaagagatgtaaactaatagttaaaatcgtagaatctatgagcctttagaatttaaaaatgtcatccacagaatcayctttctttagatattaaaaattggtatgtgaaaaatgtgcattgggagacttatttcagacttatttcagacttacatcatatcatggctcttactgatg

SEQ ID NO: 2826 - DNA, 201 bp, Homo sapiens; identical to SEQ ID NO: 2005

SEQ ID NO: 2827 - DNA, 201 bp, Homo sapiens
caacataaatatgtacaaaacactttaacttcctcacagtggacttaagataaattctgtagggccttgcatggctaagaccctatgaaaatataccttgyaattaccacatggatgctaagccatacagattttcaaggaaggagaggataaacaatttgaactgaagcagagatgtcagtaaaaaaagaacttaaaaat

SEQ ID NO: 2828 - DNA, 201 bp, Homo sapiens
tgatgggaaagtaactattgtgtaagacaagttactttagtttgtaagttccaacacttaaaaagttattatagttccctctgatgtttctacaaggtagraccaaaaagattacctaaaattttcaaatcaaaaagaaggaagtgcaccaattctccaataaaaactactttttctggaactaaactctaaagaaatttc

SEQ ID NO: 2829 - DNA, 201 bp, Homo sapiens
gatttagcaaacttatatacacatccaaatccacacacaaaactagaaaaaagtttacgtaaatttctacctctgataaacctaatgacttactattttgkgcttcctgttcaaagtgtacttttcctcaaaaacttgagtcattaaaaaaaaatattcatgatcacacattttaaaaattaagaggtttgatacattttc

SEQ ID NO: 2830 - DNA, 201 bp, Homo sapiens
tgcatactaaagtttttgggaaagcgggtaataaaaaactttggaagaatgaatggaggacttaagagagtttatagtttggaaatatttctatttggtgrtacaaaattaagcccaggcctctcatagtaacactgacattagttggatactgaatttcactatgattttaccaaataaaaaactggagacaagacagtg

SEQ ID NO: 2831 - DNA, 201 bp, Homo sapiens
gcccagcgttagctccaggacagcctggaacacagctcggtgtggccagtatagcctgtgagctgcagagaccatcagccatggactatccaggttcaagrctcctgcaagcaacaaagaaggagaatctggtacacggggtagagaggaagcttctagcaggcagctggaggtcccgagagtctcatcacagccgcaatg

SEQ ID NO: 2832 - DNA, 201 bp, Homo sapiens; identical to SEQ ID NO: 2174

SEQ ID NO: 2833 - DNA, 201 bp, Homo sapiens; identical to SEQ ID NO: 2068

SEQ ID NO: 2834 - DNA, 201 bp, Homo sapiens; identical to SEQ ID NO: 1846

SEQ ID NO: 2835 - DNA, 201 bp, Homo sapiens; identical to SEQ ID NO: 2267

SEQ ID NO: 2836 - DNA, 201 bp, Homo sapiens; identical to SEQ ID NO: 2106

SEQ ID NO: 2837 - DNA, 201 bp, Homo sapiens; identical to SEQ ID NO: 1486

SEQ ID NO: 2838 - DNA, 201 bp, Homo sapiens; identical to SEQ ID NO: 1717

SEQ ID NO: 2839 - DNA, 201 bp, Homo sapiens; identical to SEQ ID NO: 2748

SEQ ID NO: 2840 - DNA, 201 bp, Homo sapiens; identical to SEQ ID NO: 2069

SEQ ID NO: 2841 - DNA, 201 bp, Homo sapiens; identical to SEQ ID NO: 604

SEQ ID NO: 2842 - DNA, 201 bp, Homo sapiens
atttttggtgggcagcaactggctggagtaaagggcagctgtcccttactgagagcacccattctccagttcacacagtccccagaggtctactatctgaytcacggagcggacttcagatacgtcatccacctggcccttggtaggcatttgtgtttgtgactacagctgaagtcaatctaagtcatgaactgctacatg

SEQ ID NO: 2843 - DNA, 201 bp, Homo sapiens; identical to SEQ ID NO: 605

SEQ ID NO: 2844 - DNA, 201 bp, Homo sapiens; identical to SEQ ID NO: 2228

SEQ ID NO: 2845 - DNA, 201 bp, Homo sapiens; identical to SEQ ID NO: 2229

SEQ ID NO: 2846 - DNA, 201 bp, Homo sapiens; identical to SEQ ID NO: 1029

SEQ ID NO: 2847 - DNA, 201 bp, Homo sapiens; identical to SEQ ID NO: 1030

SEQ ID NO: 2848 - DNA, 201 bp, Homo sapiens; identical to SEQ ID NO: 1031

SEQ ID NO: 2849 - DNA, 201 bp, Homo sapiens; identical to SEQ ID NO: 1032

SEQ ID NO: 2850 - DNA, 201 bp, Homo sapiens; identical to SEQ ID NO: 2584

SEQ ID NO: 2851 - DNA, 201 bp, Homo sapiens; identical to SEQ ID NO: 2070

SEQ ID NO: 2852 - DNA, 201 bp, Homo sapiens; identical to SEQ ID NO: 1973

SEQ ID NO: 2853 - DNA, 201 bp, Homo sapiens; identical to SEQ ID NO: 1033

SEQ ID NO: 2854 - DNA, 201 bp, Homo sapiens; identical to SEQ ID NO: 1974

SEQ ID NO: 2855 - DNA, 201 bp, Homo sapiens; identical to SEQ ID NO: 2810

SEQ ID NO: 2856 - DNA, 201 bp, Homo sapiens; identical to SEQ ID NO: 1034

SEQ ID NO: 2857 - DNA, 201 bp, Homo sapiens; identical to SEQ ID NO: 1035

SEQ ID NO: 2858 - DNA, 201 bp, Homo sapiens; identical to SEQ ID NO: 1061

SEQ ID NO: 2859 - DNA, 201 bp, Homo sapiens; identical to SEQ ID NO: 2294

SEQ ID NO: 2860 - DNA, 201 bp, Homo sapiens; identical to SEQ ID NO: 1966

SEQ ID NO: 2861 - DNA, 201 bp, Homo sapiens; identical to SEQ ID NO: 1975

SEQ ID NO: 2862 - DNA, 201 bp, Homo sapiens; identical to SEQ ID NO: 611

SEQ ID NO: 2863 - DNA, 201 bp, Homo sapiens; identical to SEQ ID NO: 612

SEQ ID NO: 2864 - DNA, 201 bp, Homo sapiens; identical to SEQ ID NO: 614

SEQ ID NO: 2865 - DNA, 201 bp, Homo sapiens; identical to SEQ ID NO: 615

SEQ ID NO: 2866 - DNA, 201 bp, Homo sapiens; identical to SEQ ID NO: 616

SEQ ID NO: 2867 - DNA, 201 bp, Homo sapiens; identical to SEQ ID NO: 617

SEQ ID NO: 2868 - DNA, 201 bp, Homo sapiens; identical to SEQ ID NO: 1062

SEQ ID NO: 2869 - DNA, 201 bp, Homo sapiens; identical to SEQ ID NO: 1718

SEQ ID NO: 2870 - DNA, 201 bp, Homo sapiens; identical to SEQ ID NO: 1870

SEQ ID NO: 2871 - DNA, 201 bp, Homo sapiens; identical to SEQ ID NO: 1976

SEQ ID NO: 2872 - DNA, 201 bp, Homo sapiens
tcggtaaatgttctgaactttccccctcaatcactaattactagtacctcctggctcagttttcttcctcactccaaatcctttcatctctgttagcattratatctgctttgttgtaccactcaacaaatttgcttctcaatcctttattgcctcatctctgttgccacttttctcgactttatgttcctattgccaaag

SEQ ID NO: 2873 - DNA, 201 bp, Homo sapiens; identical to SEQ ID NO: 1978

SEQ ID NO: 2874 - DNA, 201 bp, Homo sapiens; identical to SEQ ID NO: 619

SEQ ID NO: 2875 - DNA, 201 bp, Homo sapiens; identical to SEQ ID NO: 622

SEQ ID NO: 2876 - DNA, 201 bp, Homo sapiens; identical to SEQ ID NO: 2816

SEQ ID NO: 2877 - DNA, 201 bp, Homo sapiens
atggagaatctctactagggcaatgcagaagggaaacatggggttggagcttccacacagagtccccactgggagactgcctagtggagctgtgagaatasggttaccaccctctagatcccagaatggtatatccaccaacagcttgcattgtgcaccagaaaagtcgcaggcactcaacaccagcctgtgaaataagct

SEQ ID NO: 2878 - DNA, 201 bp, Homo sapiens; identical to SEQ ID NO: 1464

SEQ ID NO: 2879 - DNA, 201 bp, Homo sapiens; identical to SEQ ID NO: 1465

SEQ ID NO: 2880 - DNA, 201 bp, Homo sapiens; identical to SEQ ID NO: 1466

SEQ ID NO: 2881 - DNA, 201 bp, Homo sapiens; identical to SEQ ID NO: 1470

SEQ ID NO: 2882 - DNA, 201 bp, Homo sapiens; identical to SEQ ID NO: 1473

SEQ ID NO: 2883 - DNA, 201 bp, Homo sapiens; identical to SEQ ID NO: 2797

SEQ ID NO: 2884 - DNA, 201 bp, Homo sapiens; identical to SEQ ID NO: 1040

SEQ ID NO: 2885 - DNA, 201 bp, Homo sapiens; identical to SEQ ID NO: 2234

SEQ ID NO: 2886 - DNA, 201 bp, Homo sapiens; identical to SEQ ID NO: 624

SEQ ID NO: 2887 - DNA, 201 bp, Homo sapiens; identical to SEQ ID NO: 628

SEQ ID NO: 2888 - DNA, 201 bp, Homo sapiens; identical to SEQ ID NO: 629

SEQ ID NO: 2889 - DNA, 201 bp, Homo sapiens; identical to SEQ ID NO: 2109

SEQ ID NO: 2890 - DNA, 201 bp, Homo sapiens; identical to SEQ ID NO: 2112

SEQ ID NO: 2891 - DNA, 201 bp, Homo sapiens; identical to SEQ ID NO: 2113

SEQ ID NO: 2892 - DNA, 201 bp, Homo sapiens; identical to SEQ ID NO: 2114

SEQ ID NO: 2893 - DNA, 201 bp, Homo sapiens; identical to SEQ ID NO: 1872

SEQ ID NO: 2894 - DNA, 201 bp, Homo sapiens; identical to SEQ ID NO: 1873

SEQ ID NO: 2895 - DNA, 201 bp, Homo sapiens; identical to SEQ ID NO: 1874

SEQ ID NO: 2896 - DNA, 201 bp, Homo sapiens; identical to SEQ ID NO: 1875

SEQ ID NO: 2897 - DNA, 201 bp, Homo sapiens; identical to SEQ ID NO: 2116

SEQ ID NO: 2898 - DNA, 201 bp, Homo sapiens; identical to SEQ ID NO: 1982

SEQ ID NO: 2899 - DNA, 201 bp, Homo sapiens; identical to SEQ ID NO: 1983

SEQ ID NO: 2900 - DNA, 201 bp, Homo sapiens; identical to SEQ ID NO: 1984

SEQ ID NO: 2901 - DNA, 201 bp, Homo sapiens; identical to SEQ ID NO: 1985

SEQ ID NO: 2902 - DNA, 201 bp, Homo sapiens; identical to SEQ ID NO: 1986

SEQ ID NO: 2903 - DNA, 201 bp, Homo sapiens; identical to SEQ ID NO: 1987

SEQ ID NO: 2904 - DNA, 201 bp, Homo sapiens; identical to SEQ ID NO: 1988

SEQ ID NO: 2905 - DNA, 201 bp, Homo sapiens; identical to SEQ ID NO: 1990

SEQ ID NO: 2906 - DNA, 201 bp, Homo sapiens; identical to SEQ ID NO: 1991

SEQ ID NO: 2907 - DNA, 201 bp, Homo sapiens; identical to SEQ ID NO: 1992

SEQ ID NO: 2908 - DNA, 201 bp, Homo sapiens; identical to SEQ ID NO: 2417

SEQ ID NO: 2909 - DNA, 201 bp, Homo sapiens; identical to SEQ ID NO: 1993

SEQ ID NO: 2910 - DNA, 201 bp, Homo sapiens; identical to SEQ ID NO: 2118

SEQ ID NO: 2911 - DNA, 201 bp, Homo sapiens; identical to SEQ ID NO: 2119

SEQ ID NO: 2912 - DNA, 201 bp, Homo sapiens; identical to SEQ ID NO: 2120

SEQ ID NO: 2913 - DNA, 201 bp, Homo sapiens; identical to SEQ ID NO: 1877

SEQ ID NO: 2914 - DNA, 201 bp, Homo sapiens; identical to SEQ ID NO: 1111

SEQ ID NO: 2915 - DNA, 201 bp, Homo sapiens; identical to SEQ ID NO: 1860

SEQ ID NO: 2916 - DNA, 201 bp, Homo sapiens; identical to SEQ ID NO: 1475

SEQ ID NO: 2917 - DNA, 201 bp, Homo sapiens; identical to SEQ ID NO: 632

SEQ ID NO: 2918 - DNA, 201 bp, Homo sapiens; identical to SEQ ID NO: 634

SEQ ID NO: 2919 - DNA, 201 bp, Homo sapiens; identical to SEQ ID NO: 635

SEQ ID NO: 2920 - DNA, 201 bp, Homo sapiens; identical to SEQ ID NO: 637

SEQ ID NO: 2921 - DNA, 201 bp, Homo sapiens; identical to SEQ ID NO: 2235

SEQ ID NO: 2922 - DNA, 201 bp, Homo sapiens; identical to SEQ ID NO: 1066

SEQ ID NO: 2923 - DNA, 201 bp, Homo sapiens; identical to SEQ ID NO: 1067

SEQ ID NO: 2924 - DNA, 201 bp, Homo sapiens; identical to SEQ ID NO: 1041

SEQ ID NO: 2925 - DNA, 201 bp, Homo sapiens; identical to SEQ ID NO: 1721

SEQ ID NO: 2926 - DNA, 201 bp, Homo sapiens
aataagctgcgggggctgtaccctgcaaagccacaggggcagagcagcccaaggccttgggagcccacctcttgcatcattgtgttttggatgtgagacayggaatcaaaggagtttattttggtgctttaagatttaataagtgccctgccagttttcagatttgcatggggcctgcagcccctttggtttggccaagtt

SEQ ID NO: 2927 - DNA, 201 bp, Homo sapiens; identical to SEQ ID NO: 2799

SEQ ID NO: 2928 - DNA, 201 bp, Homo sapiens; identical to SEQ ID NO: 639

SEQ ID NO: 2929 - DNA, 201 bp, Homo sapiens; identical to SEQ ID NO: 2469

SEQ ID NO: 2930 - DNA, 201 bp, Homo sapiens; identical to SEQ ID NO: 640

SEQ ID NO: 2931 - DNA, 201 bp, Homo sapiens; identical to SEQ ID NO: 1879

SEQ ID NO: 2932 - DNA, 201 bp, Homo sapiens; identical to SEQ ID NO: 1880

SEQ ID NO: 2933 - DNA, 201 bp, Homo sapiens; identical to SEQ ID NO: 1996

SEQ ID NO: 2934 - DNA, 201 bp, Homo sapiens; identical to SEQ ID NO: 1997

SEQ ID NO: 2935 - DNA, 201 bp, Homo sapiens
caaggttgggggcttctcagggggtaagaatgaggagcagaaggctggagacaagagttttccccagggtttgtaagtattgttgatgaaccatgggtgtrtgctgcttagagaaggaagggaagccatgaggggacccagaggtatcatgtaatgaagggactgagagagctgggtatctccatgaaatgtgagagtggg

SEQ ID NO: 2936 - DNA, 201 bp, Homo sapiens; identical to SEQ ID NO: 644

SEQ ID NO: 2937 - DNA, 201 bp, Homo sapiens; identical to SEQ ID NO: 1999

SEQ ID NO: 2938 - DNA, 201 bp, Homo sapiens; identical to SEQ ID NO: 645

SEQ ID NO: 2939 - DNA, 201 bp, Homo sapiens; identical to SEQ ID NO: 2545

SEQ ID NO: 2940 - DNA, 201 bp, Homo sapiens; identical to SEQ ID NO: 647

SEQ ID NO: 2941 - DNA, 201 bp, Homo sapiens; identical to SEQ ID NO: 2072

SEQ ID NO: 2942 - DNA, 201 bp, Homo sapiens; identical to SEQ ID NO: 2073

SEQ ID NO: 2943 - DNA, 201 bp, Homo sapiens; identical to SEQ ID NO: 648

SEQ ID NO: 2944 - DNA, 201 bp, Homo sapiens; identical to SEQ ID NO: 2729

SEQ ID NO: 2945 - DNA, 201 bp, Homo sapiens; identical to SEQ ID NO: 2000

SEQ ID NO: 2946 - DNA, 201 bp, Homo sapiens; identical to SEQ ID NO: 1121

SEQ ID NO: 2947 - DNA, 201 bp, Homo sapiens; identical to SEQ ID NO: 1863

SEQ ID NO: 2948 - DNA, 201 bp, Homo sapiens; identical to SEQ ID NO: 2610

SEQ ID NO: 2949 - DNA, 201 bp, Homo sapiens; identical to SEQ ID NO: 652

SEQ ID NO: 2950 - DNA, 201 bp, Homo sapiens; identical to SEQ ID NO: 2002

SEQ ID NO: 2951 - DNA, 201 bp, Homo sapiens; identical to SEQ ID NO: 2801

SEQ ID NO: 2952 - DNA, 201 bp, Homo sapiens; identical to SEQ ID NO: 1123

SEQ ID NO: 2953 - DNA, 201 bp, Homo sapiens; identical to SEQ ID NO: 2244

SEQ ID NO: 2954 - DNA, 201 bp, Homo sapiens; identical to SEQ ID NO: 2245

SEQ ID NO: 2955 - DNA, 201 bp, Homo sapiens; identical to SEQ ID NO: 1047

SEQ ID NO: 2956 - DNA, 201 bp, Homo sapiens; identical to SEQ ID NO: 1048

SEQ ID NO: 2957 - DNA, 201 bp, Homo sapiens; identical to SEQ ID NO: 1049

SEQ ID NO: 2958 - DNA, 201 bp, Homo sapiens; identical to SEQ ID NO: 2006

SEQ ID NO: 2959 - DNA, 201 bp, Homo sapiens; identical to SEQ ID NO: 2007

SEQ ID NO: 2960 - DNA, 201 bp, Homo sapiens; identical to SEQ ID NO: 1881

SEQ ID NO: 2961 - DNA, 201 bp, Homo sapiens; identical to SEQ ID NO: 1884

SEQ ID NO: 2962 - DNA, 201 bp, Homo sapiens; identical to SEQ ID NO: 2295

SEQ ID NO: 2963 - DNA, 201 bp, Homo sapiens; identical to SEQ ID NO: 2802

SEQ ID NO: 2964 - DNA, 201 bp, Homo sapiens; identical to SEQ ID NO: 2010

SEQ ID NO: 2965 - DNA, 201 bp, Homo sapiens; identical to SEQ ID NO: 2803

SEQ ID NO: 2966 - DNA, 201 bp, Homo sapiens; identical to SEQ ID NO: 1886

SEQ ID NO: 2967 - DNA, 201 bp, Homo sapiens; identical to SEQ ID NO: 1791

SEQ ID NO: 2968 - DNA, 201 bp, Homo sapiens
tcatagtggttctgtttttctgatcaaactctgactgatacaagcccaattaaaaagaggtgcccccattagtctcagaattttctttagtggcattactyactggattctggatcttagatctgtggatgatccctatcaggtcaggaaagcttcaggagccaccagtgggattttgatgtaagggattccaggggatac

SEQ ID NO: 2969 - DNA, 201 bp, Homo sapiens
tctgaaggatggctgtgtcaactgagatcaaaggggaacctgtgataagaggaaaataccctggtaggatttacagtggaaacacaaagactactagtgcrtcacggatagcaatgccaccataacctgaaataaagttaaatgctaggctctgccttcccacctacatgccctcagaaaagaaggaccaagcaaattggc

SEQ ID NO: 2970 - DNA, 201 bp, Homo sapiens; identical to SEQ ID NO: 1793

SEQ ID NO: 2971 - DNA, 201 bp, Homo sapiens; identical to SEQ ID NO: 1052

SEQ ID NO: 2972 - DNA, 201 bp, Homo sapiens; identical to SEQ ID NO: 1794

SEQ ID NO: 2973 - DNA, 201 bp, Homo sapiens; identical to SEQ ID NO: 2804

SEQ ID NO: 2974 - DNA, 201 bp, Homo sapiens; identical to SEQ ID NO: 662

SEQ ID NO: 2975 - DNA, 201 bp, Homo sapiens
ggatttccttcttttttaaggctgaataatatttaattgtatgtatatgttacatttttctttctcttttattttatttatttttttttttttggagactsggtttcactctgttgcagtgtagtcgtatgatcttagctcactgcagccttgaactcccaggctcaatcaatcctccctcctcagcctcctgagtagctg

SEQ ID NO: 2976 - DNA, 201 bp, Homo sapiens
gtgcctacatcgtagcaacaaagcttctaactatattttgaaacagattaaactgcgaacagtccagagtgatggctcagatctggagcgaattaaaatawcaatcgtactttaaggaaggggccaaaatattacactcacaagaaggcggcatggcagacactgggcctccactattctgaaggatggctgtgtcaactg

SEQ ID NO: 2977 - DNA, 201 bp, Homo sapiens; identical to SEQ ID NO: 1053

SEQ ID NO: 2978 - DNA, 201 bp, Homo sapiens; identical to SEQ ID NO: 1795

SEQ ID NO: 2979 - DNA, 201 bp, Homo sapiens; identical to SEQ ID NO: 1796

SEQ ID NO: 2980 - DNA, 201 bp, Homo sapiens; identical to SEQ ID NO: 1076

SEQ ID NO: 2981 - DNA, 201 bp, Homo sapiens; identical to SEQ ID NO: 1797

SEQ ID NO: 2982 - DNA, 201 bp, Homo sapiens; identical to SEQ ID NO: 2806

SEQ ID NO: 2983 - DNA, 201 bp, Homo sapiens
tattaaaagtcaaatttgagaaaactaaaaattgaggatactcataaagacattagaaatgttaaaaaataaaaacaagtagctagacttggtaatttcartgagaaatgattgataggccctgatgtggtttggctctgtgtccccacccaaatcgcctgtcaaattctaattcccagtgttgggggagggacctggtgg

SEQ ID NO: 2984 - DNA, 201 bp, Homo sapiens; identical to SEQ ID NO: 2546

SEQ ID NO: 2985 - DNA, 201 bp, Homo sapiens; identical to SEQ ID NO: 2074

SEQ ID NO: 2986 - DNA, 201 bp, Homo sapiens; identical to SEQ ID NO: 2754

SEQ ID NO: 2987 - DNA, 201 bp, Homo sapiens; identical to SEQ ID NO: 2297

SEQ ID NO: 2988 - DNA, 201 bp, Homo sapiens; identical to SEQ ID NO: 2636

SEQ ID NO: 2989 - DNA, 201 bp, Homo sapiens; identical to SEQ ID NO: 1798

SEQ ID NO: 2990 - DNA, 201 bp, Homo sapiens; identical to SEQ ID NO: 1799

SEQ ID NO: 2991 - DNA, 201 bp, Homo sapiens; identical to SEQ ID NO: 2638

SEQ ID NO: 2992 - DNA, 201 bp, Homo sapiens; identical to SEQ ID NO: 1800

SEQ ID NO: 2993 - DNA, 201 bp, Homo sapiens; identical to SEQ ID NO: 1801

SEQ ID NO: 2994 - DNA, 201 bp, Homo sapiens; identical to SEQ ID NO: 1077

SEQ ID NO: 2995 - DNA, 201 bp, Homo sapiens; identical to SEQ ID NO: 1078

SEQ ID NO: 2996 - DNA, 201 bp, Homo sapiens; identical to SEQ ID NO: 1079

SEQ ID NO: 2997 - DNA, 201 bp, Homo sapiens; identical to SEQ ID NO: 1080

SEQ ID NO: 2998 - DNA, 201 bp, Homo sapiens; identical to SEQ ID NO: 1082

SEQ ID NO: 2999 - DNA, 201 bp, Homo sapiens; identical to SEQ ID NO: 1083

SEQ ID NO: 3000 - DNA, 201 bp, Homo sapiens; identical to SEQ ID NO: 1085

SEQ ID NO: 3001 - DNA, 201 bp, Homo sapiens; identical to SEQ ID NO: 1086

SEQ ID NO: 3002 - DNA, 201 bp, Homo sapiens; identical to SEQ ID NO: 1087

SEQ ID NO: 3003 - DNA, 201 bp, Homo sapiens; identical to SEQ ID NO: 1088

SEQ ID NO: 3004 - DNA, 201 bp, Homo sapiens; identical to SEQ ID NO: 2075

SEQ ID NO: 3005 - DNA, 201 bp, Homo sapiens; identical to SEQ ID NO: 2807

SEQ ID NO: 3006 - DNA, 201 bp, Homo sapiens; identical to SEQ ID NO: 2299

SEQ ID NO: 3007 - DNA, 201 bp, Homo sapiens; identical to SEQ ID NO: 2755

SEQ ID NO: 3008 - DNA, 201 bp, Homo sapiens; identical to SEQ ID NO: 666

SEQ ID NO: 3009 - DNA, 201 bp, Homo sapiens
acccatatgtgggcccctgcacaaggaagtacaaatgcaagacttcttccatcttcaaccaacaggagtaagacggtggacaccaccagatgagagagttkatgtcgtggagaaaggaggtttgtcagcttcatgttaaccactgaagagatgttacatgttacatacatatatatatgtacatttttttttttttagaca

SEQ ID NO: 3010 - DNA, 201 bp, Homo sapiens; identical to SEQ ID NO: 667

SEQ ID NO: 3011 - DNA, 201 bp, Homo sapiens; identical to SEQ ID NO: 2808

SEQ ID NO: 3012 - DNA, 201 bp, Homo sapiens; identical to SEQ ID NO: 2652

SEQ ID NO: 3013 - DNA, 201 bp, Homo sapiens
tgacagttaagctaaccaaaaggtgatgtttccttgactcaccctcctggagtctaagccttagtgggcagctccatgtcccacctggtgcaagctgtaayagatataatctgaggggttcagcttcatattcatgtactagtgcagtgctgattacacagcagacttgaaacagtagtaaattgtagagaagaaggaaaa

SEQ ID NO: 3014 - DNA, 201 bp, Homo sapiens; identical to SEQ ID NO: 1089

SEQ ID NO: 3015 - DNA, 201 bp, Homo sapiens; identical to SEQ ID NO: 1172

SEQ ID NO: 3016 - DNA, 201 bp, Homo sapiens; identical to SEQ ID NO: 1173

SEQ ID NO: 3017 - DNA, 201 bp, Homo sapiens; identical to SEQ ID NO: 1174

SEQ ID NO: 3018 - DNA, 201 bp, Homo sapiens; identical to SEQ ID NO: 1175

SEQ ID NO: 3019 - DNA, 201 bp, Homo sapiens; identical to SEQ ID NO: 1239

SEQ ID NO: 3020 - DNA, 201 bp, Homo sapiens; identical to SEQ ID NO: 1277

SEQ ID NO: 3021 - DNA, 201 bp, Homo sapiens; identical to SEQ ID NO: 1294

SEQ ID NO: 3022 - DNA, 201 bp, Homo sapiens; identical to SEQ ID NO: 1303

SEQ ID NO: 3023 - DNA, 201 bp, Homo sapiens; identical to SEQ ID NO: 1306

SEQ ID NO: 3024 - DNA, 201 bp, Homo sapiens; identical to SEQ ID NO: 1307

SEQ ID NO: 3025 - DNA, 201 bp, Homo sapiens; identical to SEQ ID NO: 1318

SEQ ID NO: 3026 - DNA, 201 bp, Homo sapiens; identical to SEQ ID NO: 2323

SEQ ID NO: 3027 - DNA, 201 bp, Homo sapiens; identical to SEQ ID NO: 2326

SEQ ID NO: 3028 - DNA, 201 bp, Homo sapiens
ctgtccagacaaattgctcccatgcaagtcactctccccactgccttccctccagagcatcatcacaatcccaggcagataggaactttccaaccacgcarcaaaatggaggcccaaaatagaaatggagttgagttctagaaataatgttacatttcctacacacctgaatttgggaaatgaatgatagccagaaaggga

SEQ ID NO: 3029 - DNA, 201 bp, Homo sapiens
aaaaataggtcacatactaaggaatgattctgaaggatatgggaggaaaatcaacagaaagggatacaccttgaagggagggtgtacacctctggaacackagtgaatgtgaaaaggatgtgcgtagatagagttctgtagagggctgggagaaatgtgacaggtttcatgcttcatggcatggaggaggaagggccacgt

SEQ ID NO: 3030 - DNA, 201 bp, Homo sapiens
gggagaaatgtgacaggtttcatgcttcatggcatggaggaggaagggccacgtggtaatgcttgttggatgcctgttggaaataatgtaggatgaagacrgaaccataacacagtttacttccttgagcgttaggtggtatatgtattgcattcgacttccttcattgaagttgtggatgctgcagtcactgccgggatc

SEQ ID NO: 3031 - DNA, 201 bp, Homo sapiens
aaggatggcactgaaatttttctgtagcaagaagttaggtatgatttggtttgttttgagaataaacaagattaagaaaaatttacattttagaccagtcragtactttaggtgtcatcttttacagatttcacatttaatataattctactcctgacattaaattttattactctacaaactagccagaagtaataaggt

SEQ ID NO: 3032 - DNA, 201 bp, Homo sapiens
gagtggtcagcaagctaagattcctttaccataaatgtgaatatatttatgttaaactaacaatagctgctacaaacaaatacaaaaatctatattggcaytctctgccacagttggttctgaaataaccacgttaagtctacagctgtaattagtgaatatattctagatgattaatagaacaatttctaaaggagtata

SEQ ID NO: 3033 - DNA, 201 bp, Homo sapiens; identical to SEQ ID NO: 1262

SEQ ID NO: 3034 - DNA, 201 bp, Homo sapiens; identical to SEQ ID NO: 1263

SEQ ID NO: 3035 - DNA, 201 bp, Homo sapiens; identical to SEQ ID NO: 1270

SEQ ID NO: 3036 - DNA, 201 bp, Homo sapiens
tttcatgaaaacaataccaaaaggagagatgaaaatggctacactaacatctaacaaaataagactttaagaaaaaaactgttactagagacaagggataytttagaatgatagaggtaaatttgtagcagacatccaacaacagacacccaaaatacatgaaacaaaactgacagatttcagaggacaaatagacaatgc

SEQ ID NO: 3037 - DNA, 201 bp, Homo sapiens
acagattcagaaggaaggacggtaaagggaaaacaaaagacagcctctgaacaatctaaaacaaggactcaaatttcatgcactttttccagtttgaacckctgaagccttccctaagactgtttacttttccttatatagaaatttaacaacactaataatattgttgccaacccataataagttagaaaaaaagaaagg

SEQ ID NO: 3038 - DNA, 201 bp, Homo sapiens
cagctcaggtcatgcagtaatttggtgggccatgcttaattattcagtccctaataccgtcctgtagcaagccaaaagctggttgtcaaaagaagagtacrggtggaagagagcgcttctcagacctcggctgcgcggccctaggagtgccgagctcacggaaccacagccatgactgaggccaatgtgaatctgaaggcc

SEQ ID NO: 3039 - DNA, 201 bp, Homo sapiens
gtcctgtagcaagccaaaagctggttgtcaaaagaagagtacgggtggaagagagcgcttctcagacctcggctgcgcggccctaggagtgccgagctcayggaaccacagccatgactgaggccaatgtgaatctgaaggcctagcccctcgccgatgcccacctcaccaagaaaccactggagttcattcagtagtcgt

SEQ ID NO: 3040 - DNA, 201 bp, Homo sapiens
gcgggatgaaccagcccctgtggaaatttagaagtaacgacgtccgtcaatttctgtatgaaaaatatacagatcgtgtgacacgtcttctgggaatgaargtctgctaaactcgccgtcacgagtagatgaacacatttaaagtttgtagttaagaggaaaacaacgccaacgacacaaatgccccaagcgctggatgaa

SEQ ID NO: 3041 - DNA, 201 bp, Homo sapiens
ctggctgaggtagtcttgacaggtttttctactgtaaagtgattcttttttccaccttttcatactttactctttggaggggagtcactgtggatagccckcacttaaggagtgggagttgtactccacctccctgagggggagtagctacatacatgatggaattcttctgtctagagatttatctattctcccccactt

SEQ ID NO: 3042 - DNA, 201 bp, Homo sapiens
gtaatcttttttgaacagttattcaaatattgtgccagacagtgtgagggtggtggggcaaataatggaaagtgttcttgttcccctgggacctacatttygagggagaggtagataggcattttcataatcttcattttctttgcattctttatttgtgtttacctttctattgagtggactgttaaggaagcaccagag

SEQ ID NO: 3043 - DNA, 201 bp, Homo sapiens
agccccacttcccatccagcacacactgctggcacccccactcagcccccggcactgcccctgaatttctctcatagctagctagctctccattggcaacrctggtgcctgtccctgccagcagccccaagtcagcaccatgcccggctgttcattattaaattgaaaaaaggaggagggtcctgccttgattcccttcca

SEQ ID NO: 3044 - DNA, 201 bp, Homo sapiens
gaaatgcccaggctgcagcacctgcaggtgtgacccagctgactccaggccttcagagcagtcgttcttatccctgccagtggataggaatcacctgtggytttacagtgacctccacctccacctttggaggtcttgaatctgtattagcaaataacaactccctttctcctgcccccaagcaactctaatgtatatgct

SEQ ID NO: 3045 - DNA, 201 bp, Homo sapiens
ataaattcagtcgaattgaagcttatattgggaagaaaacagccggctactagctgtaatatagacgttcatggccatatgtaaagtgcagccatgttacwcaaggatccatttaatttgttctgggctctgatgtcaccatgcacccactgaggtgtttttaaaacacattgagatcatacatatagttaaaaacaatca

SEQ ID NO: 3046 - DNA, 201 bp, Homo sapiens
aaataaaataaaaataataaaaataagaaataaatatatcacctcgttagtccttacaacaaagccaatagcctttgttcacataagtggaatcccactcycatttcatagctaagaaaactgaggctcagaagagaataggatttacccaaagtctcaggaattcatctgagccctatggaccaccccacagcagtgcag

SEQ ID NO: 3047 - DNA, 201 bp, Homo sapiens
cactgcactctagcctgggcgacagagtgagactctgtctcaaaaaaagccaaaaaacagaaacaaaagtaaaagcactcatttattattcaaaacatgtkcaagagtcctggttcaaaaataccatgaagttggtgcaaagagaagtttaaagtgttgaagtgaagcttgaaataataaaattttttaaaaaagatagaa

SEQ ID NO: 3048 - DNA, 201 bp, Homo sapiens
ctctcctgaagataatcagcattgaagcggctctgagggatttcacagtatattgctcctcataatacccttaaaagaatatggagaaacagaggttacartaactggggactcatgtatagtcttggtggataccagagctaccttatctgccactaccataaaacacactttcataagccaacagatccctcagagtta

SEQ ID NO: 3049 - DNA, 201 bp, Homo sapiens
caaccttatggatgtgttttgtaaaagtctcatttagaacctttggggcctcactcagtcacccctgaatcctcatcttttcatgtacacacctctgtccrttttctcctcttttcttcctaattagctgcctgtataattaaacctttcctcatttagaggttctgagccctcactgatacactaatcaccctgtggccc

SEQ ID NO: 3050 - DNA, 201 bp, Homo sapiens
cctagttggctagactaagtattttagctgtctccaattggtaactgtttaagaggtttaaagacacaaattaagttggtaaaatttgaatatgtgaatcygggtgaaggatatatggtggtttggtgacactatttttgcagcttttctgttggtttgaagttcgttgaaaatgaaaaggtccattaattaagaaggtgg

SEQ ID NO: 3051 - DNA, 201 bp, Homo sapiens
agagaagaaggagatggagtgatttggggaatcaaaagtcaaatctaggtttttgggttttgcaccaaatttgatattgcctgcattgaaaagaacccctsttcttggattagattgaatttatttggtgcaaacccacgctctataaatactagtatatttttactttttaataccctgcatgaaagtccaacgatgatc

SEQ ID NO: 3052 - DNA, 201 bp, Homo sapiens
tttcagaatatatatactctatgactacaggacaatatttgccaatgggatcagttatgatgtctgtttctctttgaggaacagtctatgccctttacctrtcaattaacccagcagagggctggtttctgtgtcttattggcccccacacaaagttgttttctttgccccttagtgcagtgcagacaattctattaagaa

SEQ ID NO: 3053 - DNA, 201 bp, Homo sapiens
agcatcccttgggcatcccgggaggtgtccctgccctccatggctcaccgtctgccacatggcccagcagcagctactctgcagggccatgtgctgccatsacaggtactgatccccatgggcgcgggcctgcaggtcctggaggtaccagtggtcaggtgctttgtacatgcagctcatatagagcaagctagccacact

SEQ ID NO: 3054 - DNA, 201 bp, Homo sapiens
cttcttcctttccaatttggatgccctttatatctttctgttgttggaatgctcgaggtaggacttccagtattaggttgaatatcactggtgaaagtgarcatccttgttgtgttccagatcttagaggaaaggctttccatttttccccactcattatgatactagctgtgggtatgtcatatacagtttttattatgt

SEQ ID NO: 3055 - DNA, 201 bp, Homo sapiens
ttgcaaacatttcatgtcccgctacttggggacctccctgggtcaatgtggcttataaggagtatacatacacatgcttgcccatctcacacccatcattyatatatcaagatgcctcctgttgcatttttaattttcacacatttccagttgagaatcaggcactgactctagcaacccatgaactcccagaatctgaga

SEQ ID NO: 3056 - DNA, 201 bp, Homo sapiens; identical to SEQ ID NO: 1144

SEQ ID NO: 3057 - DNA, 201 bp, Homo sapiens
gtgtttgcatcattggagtcctcctctcactaaataagagcatggaaagtcaagagtattattttaaaaggttacagttcaagagccccttcatttctcaratttgttattggcatgagccaagaacaattcctccagtttctcagtatgagacggaagaaattgctatttagcttgtctctgtagcccaaggtcatttcc

SEQ ID NO: 3058 - DNA, 201 bp, Homo sapiens
taaacccttgcatttatgaccaactgatttttgacaaaggtgtcatggccatttaatgtggacagaacagacttttatcaagtgattctggggaaaatggwtatccacaagcaagagaatgaacttggacctctctgccttacaccagacacaaaaattactcaaaatgcatcaaagacctaaatgtaagtgctaaaacta

SEQ ID NO: 3059 - DNA, 201 bp, Homo sapiens
gaagagaaaaatactcatttcaaattaaaattttaagaacaccaatcacaaaacaagagcatcatttaaaaatgcgtttgtaatcctacttggcaggtggsctaacatttcgaacttgacaaagacgtggaactgtgcttccaaggctgacaggcaggaagagcccacacagcctccggggccagcccttgttcctctctc

SEQ ID NO: 3060 - DNA, 201 bp, Homo sapiens
catcacagtaatctcaagaggaataggaaaaacatgaaagaaaaaaggaataagccactgatacagtgggcttaagctttgatgtgcaatgtggaatgctyactgtgatatttattctctgtcccaatgaactgggaaatggggatggagtccataaatctacgtggttttaaaccacctcaaaggtgagagataatttaa

SEQ ID NO: 3061 - DNA, 201 bp, Homo sapiens; identical to SEQ ID NO: 210

SEQ ID NO: 3062 - DNA, 201 bp, Homo sapiens
tgtctccaaattctgtcagcattcctgaaagtctttagatgtgtgggaattttcaattttcctttgaaacagttgtatcattttaactgttccttaatgasttaaactaaatctgtgatatgtttattttatatttatatgcaggtcgtggctttagcactaaaacaaagcccttaacaaagagcatgaagttcattgggt

SEQ ID NO: 3063 - DNA, 201 bp, Homo sapiens; identical to SEQ ID NO: 935

SEQ ID NO: 3064 - DNA, 201 bp, Homo sapiens
tctttgcacattcaagtctaatgtgcataagagccgaaaatataagtaacatttttgaattttatttttgtaatttggtcttcactttaaccaactactgractttttctctctaaaaataaaaacatcttaatttataataaaacaaataaccaaatcaggctcctataaccactgcagcctgtaggaatctcttttggc

SEQ ID NO: 3065 - DNA, 201 bp, Homo sapiens
aaatgaatatcaatgaagtagctatctagtgatgtaggggtggagagaacgcaggtggttaagaagggtagaaactgttctgaggtggaaggctacaaagkaggggctctgaggatcaaagggaatttttttgttgtagaaggtatcaggaaacatttcaaaagactgaaaggggcaaaaacaatgactggagtctgggat

SEQ ID NO: 3066 - DNA, 201 bp, Homo sapiens
gtgtctgtgacatagtgaacagtcgtctaggatgactagtcaatgcatctagtcaatgctagcagctactatcattattattcgcactctacacagccagygtggggattaatggcatgatgtgctttgagagggaaatttctcactaagcctattttttgtttatttgtttgtttaagagacaagatctccctctggaac

SEQ ID NO: 3067 - DNA, 201 bp, Homo sapiens
caaatagaatatttcatagagcccaaagtaaggaagatgaacatttttgcctcgggatttccaaagaataaatgtgaaatgtgtctccattctgtggtcayggccaaagtctgcagcctagctctgtcagccagtcatactttccttcaaacgctttggcaggtacattgtatagaaactactggagagagatccctcatc

SEQ ID NO: 3068 - DNA, 201 bp, Homo sapiens
accctagtttcattggttctcatggcagcctctcaaattatacaattgggtatttttgtaactccatctcttcatctcttattttttagtctttttttttmtctattggagtttggatttttagcttttcaatttcatggaaaaaacagattttaaataatatttatgaaacagtataagccttgcagtttagactatttt

SEQ ID NO: 3069 - DNA, 201 bp, Homo sapiens
ctttttttttatctattggagtttggatttttagcttttcaatttcatggaaaaaacagattttaaataatatttatgaaacagtataagccttgcagttyagactattttagaaacatcagattatattagttatatgggcaactggtaattttattgtctacattttataaagtctaaaaagagaaacaaggaataata

SEQ ID NO: 3070 - DNA, 201 bp, Homo sapiens
gaaatagagatgaaataccaagaaattaaatctattttgcaatttttgaaaaatggcttgaaataagttgtataatgtattagtggatccacagtggtaaytgaataaactagttcactattctggatataccagtttaataatgtcataatttgtgcagccatttgcttgctttttccctctaaaatatttaaggcactc

SEQ ID NO: 3071 - DNA, 201 bp, Homo sapiens
ttcctagggcaaaatctttttcccttgaagactggaaatattatccatgttgtcctccggaatattttcaatgacttgtgccctgccagctctagcttttsaagggtctacactcatcatcaacaggtagactggtttttacaaatgtttttaccataacttcatttcctgtttcaaatgtgaaatggatcaaaaatgaga

SEQ ID NO: 3072 - DNA, 201 bp, Homo sapiens
atgagacactgaagcagtttaaagatcgggttttcaatgcgtgacatataactgtccattttcaggctggaaaaatgaatggctttctaggaggcatactrttcaactcacctttacaactttcaatcactgtggctgaaatagagtcatgaaagacaagatgttgataatacttacaagagaaagaagaaataaaatccc

SEQ ID NO: 3073 - DNA, 201 bp, Homo sapiens
tgtaaagaaacagtttctttctttcctctatttttcctaccattcaacttttataagacaattgaattttctctacaaaaagcaaataaattacatttacwgagtagaattcaaaaggtaaaggtcaaagaaaatatgaggctatttaataatggtggttcttagcttttcttttagatgtgtatcagcatatataagttt

SEQ ID NO: 3074 - DNA, 201 bp, Homo sapiens
ttcctgtttagtcttgggtcccatccccaagatatctcattatgcatatgcaaatattccaaaatccaaaaaaatcccaaagtcaaatccagacgcttttrgttccaagcatttcggataagggattctcaacctgaaactgtttttaaagaaaatttcgaggagaaaaaagctgagcaaattccacactccttaaaaaaa

SEQ ID NO: 3075 - DNA, 201 bp, Homo sapiens
agcctgggtgacagagagagactccatctccaaaaaaaaaagaaaatgattttcacacagctggaacatgtttttttaagaacattcataaaagtagtatyaagaactactattagtaagctgtgttcacaaagaaaaatattccgctatatctgcacctaaagtcctgtccatacaagatccaaaaaacaagacaggaag

SEQ ID NO: 3076 - DNA, 201 bp, Homo sapiens
tagccattataatgtcataacacaacacattatttctatgtttagtatgttttgatgcacatatgcttaacactgattacaattgcctagcctattcagtrtagcaacatattgtacaacatctttgtagcccaggagaaataagctgtaccatctagcctaggtgtgtagtaggcttgtaccatctagacttatgtaaat

SEQ ID NO: 3077 - DNA, 201 bp, Homo sapiens
caacacattatttctatgtttagtatgttttgatgcacatatgcttaacactgattacaattgcctagcctattcagtatagcaacatattgtacaacatytttgtagcccaggagaaataagctgtaccatctagcctaggtgtgtagtaggcttgtaccatctagacttatgtaaatacactctatgatgtttgcacaa

SEQ ID NO: 3078 - DNA, 201 bp, Homo sapiens
acagaattgcccaatggcatatttcttagaacatattccctttggttaagtgacacatgactgtttttatggcttttttacccagacttggatttgagcaygagaattaccttgtatgcacctttcacttagtaggctattagttatttttgttctccggtttaaattaaaaataaattgttatatacatatatgtatata

SEQ ID NO: 3079 - DNA, 201 bp, Homo sapiens
ccatggttacaaataaacacccatatttcaatagcttaacacaaccaagatttattatgtgttcatgctgtatatccagtgcttattagacgggaactcgkttccactgattcattcaggtggatccaggataacgggtattgcaccatgttgtgatgctgccacctcaacatggagctgtatgagaggaagaaagagcat

SEQ ID NO: 3080 - DNA, 201 bp, Homo sapiens
aaaaaaaaaaggataaggtatccatggttacaaataaacacccatatttcaatagcttaacacaaccaagatttattatgtgttcatgctgtatatccagygcttattagacgggaactcgtttccactgattcattcaggtggatccaggataacgggtattgcaccatgttgtgatgctgccacctcaacatggagctg

SEQ ID NO: 3081 - DNA, 201 bp, Homo sapiens
attttatttcttaagacttattaaagcatgggactaatgaaatgattatttcttagaatctgaatgcaggcatctataacaatttttggaaaaatactccrcgattttcttggcaggttttggaaccttgaaatgtgaaaaagcagcacacaggtgcgcattaaacaggtgctttagacagtacgtatgagtagttcagag

SEQ ID NO: 3082 - DNA, 201 bp, Homo sapiens
caagaactggaaggctttttctacaaaggaccagaaagtcaatattttaaggttgtgtaggccagataatccctctcataactactccactctgccattasagcatgcaagcagccatgataattcataaagtaatgatcatgggtatgcttcaattttgtatttatgaaaacgggtaacaagcagaatttgatgcacagg

SEQ ID NO: 3083 - DNA, 201 bp, Homo sapiens
tatttactgtagcaagcgtagcctgttctaatacagagaagaatgggtttcagttttgagagctaaccaaaaatctagttagactcttaaacatttcaacsttttaattaaaggcttagtagcatgtatcaagaactggaaggctttttctacaaaggaccagaaagtcaatattttaaggttgtgtaggccagataatcc

SEQ ID NO: 3084 - DNA, 201 bp, Homo sapiens
tatagagagaagagacgagttatccataaaggcagaataaataggtttgccattggcatgttcctaagacattaatagagtaagctatattttccctagamtgtttatacttgtgtcataaacacgtatgtgtcacaatactgtgaaccactgcatcacaccctccaacacactcacacacacacacacacatacacacac

SEQ ID NO: 3085 - DNA, 201 bp, Homo sapiens
tcttgctgggtctttcccaagaaatctctttggaaatgggaagttatgtctggaattcaggtggcagaaggccacctgtgtgcctactgtttggaagtcarggatggaggagggtgcaggaaagcatattgcattggcaccaccaaaatgatgcactctaacctgaggccacacacaccacacacacacatgcttctacag

SEQ ID NO: 3086 - DNA, 201 bp, Homo sapiens
agaaagcctcaggcagtgaaaggaaggttctctggcccttggagggagggctagtgtgcacgcaactggcaaaggcatgcggatgcaggtgggacccagasagccaggggtctccactgcttctgatgtcaaaacgtgttccttccaattggccaactgccctctccatgtcccagggcagattcctgcttctctagaaac

SEQ ID NO: 3087 - DNA, 201 bp, Homo sapiens
aatttgggaaaatgtaagtaaggtagaatccagtttatgggataatttttggatgcgagaatacttttaaaccttcacttatgattgttattgcacaaacragattggtctgccctagcaagtctcaccgaggttttgcaacatatttacaagtacaaatctgtgtggcaaagagtactttttgtactatgggcagctttg

SEQ ID NO: 3088 - DNA, 201 bp, Homo sapiens
tttaagccagtgcttccaaagaggcccaccttctccacctgcctgtctaaaattcatcatatttgagcttttcttggactacaagcggccatttgaaaatmagtatcttctgattgcatcggaattacctgggaggttttttaaatatgaaggttcccaggcctcatactagacctaaagaatcaatagcacagagctgaa

SEQ ID NO: 3089 - DNA, 201 bp, Homo sapiens
ttaagccagtgcttccaaagaggcccaccttctccacctgcctgtctaaaattcatcatatttgagcttttcttggactacaagcggccatttgaaaatamgtatcttctgattgcatcggaattacctgggaggttttttaaatatgaaggttcccaggcctcatactagacctaaagaatcaatagcacagagctgaaa

SEQ ID NO: 3090 - DNA, 201 bp, Homo sapiens
aggaatctttccaccacttcgatttcatcttactcctgaaacagtcagccagaactgtctaattcagtctatacttctgatacaaaactctacccagcaaycactatggttttgttgctttaggtacgtgttagaaagcacccacatcaatttacagaaaatccttaactgaatctctagtcccagaggagtcatatttta

SEQ ID NO: 3091 - DNA, 201 bp, Homo sapiens
ttggtctttgagacaatggtgccattaaggacccccgccaggcccaccagcaggccgagggcacagaccagcatctccatggtctcaggcacctggattakttcatggacctctggggcaccaagggaagacagagttataaggtacagagagcaggggctggccttggatgtgggaggtgttgggtattcgaaaccatga

SEQ ID NO: 3092 - DNA, 201 bp, Homo sapiens
aggtctcctctgaactgtgttgctttgcttccccaagtagtcccttctccaaagcaagacctaattgtgtgctatataaagtcggcagggcattctgaccrccaagttccattctgagcaggaagaagtcaggcaggctggtgacctcccctgtccagttaccaaaatcgagagggctttaatctggggtgtagcccattg

SEQ ID NO: 3093 - DNA, 201 bp, Homo sapiens
tccaacctttactgagcacctactgtatgctttagcatgttgtccccatcattttggagaggacatagtcaatctagtacatggtacaatcttttttcctyccactcagcaacagcaaaatacatctggctcccgaaacagtatggttttccctcagatatttttctaaatcacattgatttgaattaaatagttcagaaa

SEQ ID NO: 3094 - DNA, 201 bp, Homo sapiens
ccaaagtgctgggattataggcatgggccactgcgcctggcctatttatttctattcacactgcacatccctcatccaactatgaaatccttccctggagkgattacttgagtgaacaagtatataaaatgaacacacacaaaaaataaaacctgtggatggcctacatgactgtttactgatatgggtccaggtaaatca

SEQ ID NO: 3095 - DNA, 201 bp, Homo sapiens; identical to SEQ ID NO: 680

SEQ ID NO: 3096 - DNA, 201 bp, Homo sapiens
ccccaagtgtgtgtagggattgagtgggatagggtgagagaggtgtgtgtcttcacatgagtctatgcatgcaagtgtgtgtgtaggaagaggagaggagkgattaattgatgttccctcctctctgctgggagcccttagagataagggaaaagaagagacagcaacaggtttgaacaccaattagataagacttcatga

SEQ ID NO: 3097 - DNA, 201 bp, Homo sapiens
tcttctgatgccagatctgacattcaaatacgactgtcctttctgttggttaccttttaacattgcaatgaaattcagtggatatttagttttagaccccragctgcattaatctaatggatctccacattttagaatatccttcatgtatatatcataagtgagagaaataagtgataaagaatgaagagggcagatttg

SEQ ID NO: 3098 - DNA, 201 bp, Homo sapiens
agctgccctcactggccctgccgctctaccagtacaccagtgagtccaccccgcgcctccgcagcgcgcccagctgcatcctcctggccatgttcctcgtycactactggcatcggtgcttaatttacccatttctgatgcgaggaggaaagcctgtgccactgttggcgtgcacaatggcgattatgttctgtacctgta
